(19) United States
(12) Patent Application Publication
(10) Pub. No.: US 2004/0076955 A1
(43) Pub. Date: Apr. 22, 2004

(54) Methods of diagnosis of bladder cancer, compositions and methods of screening for modulators of bladder cancer

(75) Inventors: David H. Mack, Menlo Park, CA (US); Natasha Aziz, Palo Alto, CA (US)

Correspondence Address: HOWREY SIMON ARNOLD & WHITE, LLP, BOX 34, 301 RAVENSWOOD AVE., MENLO PARK, CA, 94025, US

(73) Assignee: Eos Biotechnology, Inc., South San Francisco, CA (US)

(21) Appl. No.: 10/188,832

(22) Filed: Jul. 2, 2002

Related U.S. Application Data
(60) Provisional application No. 60/372,246, filed on Apr. 12, 2002.
(60) Provisional application No. 60/350,666, filed on Nov. 13, 2001.
(60) Provisional application No. 60/343,705, filed on Nov. 8, 2001.
(60) Provisional application No. 60/310,099, filed on Aug. 3, 2001.
(60) Provisional application No. 60/302,814, filed on Jul. 3, 2001.

(51) Int. Cl. C12Q 1/68; C07H 21/04; C12P 21/02; C12N 5/06; C07K 14/47

(52) U.S. Cl. 435/6; 435/69.1; 435/320.1; 435/325; 530/350; 536/23.5

(57) ABSTRACT

Described herein are genes whose expression are up-regulated or down-regulated in bladder cancer. Also described are such genes whose expression is further up-regulated or down-regulated in drug-resistant bladder cancer cells. Related methods and compositions that can be used for diagnosis, prognosis, or treatment of bladder cancer are disclosed. Also described herein are methods that can be used to identify modulators of bladder cancer.

### CROSS-REFERENCES TO RELATED APPLICATIONS

[0001] This application is related to U.S. S No. 60/302,814, filed Jul. 3, 2001; U.S. S No. 60/310,099, filed Aug. 3, 2001; U.S. S No. 60/343,705, filed Nov. 8, 2001; U.S. S No. 60/350,666, filed Nov. 13, 2001; and U.S. S No. 60/372,246, filed Apr. 12, 2001, each of which is incorporated herein by reference.

### FIELD OF THE INVENTION

[0002] The invention relates to the identification of nucleic acid and protein expression profiles and nucleic acids, products, and antibodies thereto that are involved in bladder cancer; and to the use of such expression profiles and compositions in the diagnosis, prognosis, and therapy of bladder cancer. The invention further relates to methods for identifying and using agents and/or targets that inhibit bladder cancer.

### BACKGROUND OF THE INVENTION

[0003] In the United States, over 50,000 new cases of bladder cancer are diagnosed annually, and more than 10,000 deaths will be attributed to bladder cancer. Bladder cancer is now the fourth most common cancer among American men and the ninth most common cancer among American women. It occurs three times more frequently in men than in women, and it occurs roughly twice more frequently in white versus black men.

[0004] Bladder cancer rarely occurs in people younger than 40 years of age, being primarily a disease of older men. Nonetheless, bladder cancer is a significant cause of illness and death in the United States. The risk of bladder cancer increases steeply with age, with over half of all bladder cancer deaths occurring after age 70. In white men older than 65, the annual disease rate of bladder cancer is approximately 2 cases per 1,000 persons; this contrasts with a rate of 0.1 cases per 1,000 persons younger than 65.

[0005] Within the United States, bladder cancer rates are higher among people who reside in northern versus southern states, and is higher for people who live in urban versus rural areas. Although this difference suggests that environmental as well as genetic factors may contribute to the development and progression of the disease, other studies confirm that certain genes play a role in bladder cancer. For example, expression of the tumor suppressor gene p53 has been associated with an adverse prognosis for patients with invasive bladder cancer. A retrospective study of 243 patients treated by radical cystectomy found that the presence of nuclear p53 was an independent predictor for recurrence among patients with mid to late stage tumors. Esrig, et al (1994) N.E. J. Med. 331:1259-64.

[0006] Urinary bladder cancers represent a spectrum of diseases that can be grouped into three general categories: superficial, invasive, and metastatic. The prognosis for treatment is highly dependent on the stage at which the tumor is first diagnosed. A unique aspect of bladder cancer treatment is that repeated surgical biopsy is an integral part of routine patient management. This has permitted the conduct of molecular genetic studies of tumors from specific stages of the disease. The results of these studies suggest that bladder cancers develop and progress along at least two discrete pathways, which may account for differences in invasiveness and metastatic potential. Incorporating molecular genetic factors into the current paradigm for diagnosis and treatment will optimize the probability of cure and allow the quality of life for bladder cancer patients to be maintained.

[0007] Early detection and treatment can prevent reoccurrence and progression of the disease to an incurable stage. Thus, the identification of novel diagnostic markers and therapeutic targets will improve the current treatment of bladder cancer patients. While industry and academia have identified novel sequences, there has not been an equal effort exerted to identify the function of these novel sequences in disease states. The elucidation of a role for novel proteins and compounds in disease states for identification of diagnostic markers and therapeutic targets is essential for improving the current treatment of bladder cancer patients. Accordingly, provided herein are methods that can be used in diagnosis and prognosis of bladder cancer. Additionally, provided herein are molecular targets for therapeutic intervention in bladder cancer and other related bladder diseases. Further provided are methods that can be used to screen candidate bioactive agents for the ability to modulate bladder cancer.

### SUMMARY OF THE INVENTION

[0008] The present invention therefore provides nucleotide sequences of genes that are up- and down-regulated in bladder cancer cells. Such genes are useful for diagnostic purposes, and also as targets for screening for therapeutic compounds that modulate bladder cancer, such as hormones or antibodies. Other aspects of the invention will become apparent to the skilled artisan by the following description of the invention.

[0009] In one aspect, the present invention provides a method of detecting a bladder cancer-associated transcript in a cell from a patient, the method comprising contacting a biological sample from the patient with a polynucleotide that selectively hybridizes to a sequence at least 80% identical to a sequence as shown in Tables 1A-13.

[0010] In one embodiment, the present invention provides a method of determining the level of a bladder cancer associated transcript in a cell from a patient.

[0011] In one embodiment, the present invention provides a method of detecting a bladder cancer-associated transcript in a cell from a patient, the method comprising contacting a biological sample from the patient with a polynucleotide that selectively hybridizes to a sequence at least 80% identical to a sequence as shown in Tables 1A-13.

[0012] In one embodiment, the polynucleotide selectively hybridizes to a sequence at least 95% identical to a sequence as shown in Tables 1A-13.

[0013] In one embodiment, the biological sample is a tissue sample. In another embodiment, the biological sample comprises isolated nucleic acids, e.g., mRNA.

[0014] In one embodiment, the polynucleotide is labeled, e.g., with a fluorescent label.

[0015] In one embodiment, the polynucleotide is immobilized on a solid surface.

[0016] In one embodiment, the patient is undergoing a therapeutic regimen to treat bladder cancer. In another embodiment, the patient is suspected of having metastatic bladder cancer.

[0017] In one embodiment, the patient is a human.

[0018] In one embodiment, the bladder cancer associated transcript is mRNA.

[0019] In one embodiment, the method further comprises the step of amplifying nucleic acids before the step of contacting the biological sample with the polynucleotide.

[0020] In another aspect, the present invention provides a method of monitoring the efficacy of a therapeutic treatment of bladder cancer, the method comprising the steps of: (i) providing a biological sample from a patient undergoing the therapeutic treatment; and (ii) determining the level of a bladder cancer-associated transcript in the biological sample by contacting the biological sample with a polynucleotide that selectively hybridizes to a sequence at least 80% identical to a sequence as shown in Tables 1A-13, thereby monitoring the efficacy of the therapy. In a further embodiment, the patient has metastatic bladder cancer. In a further embodiment, the patient has a drug resistant form of bladder cancer.

[0021] In one embodiment, the method further comprises the step of: (iii) comparing the level of the bladder cancer-associated transcript to a level of the bladder cancer-associated transcript in a biological sample from the patient prior to, or earlier in, the therapeutic treatment.

[0022] Additionally, provided herein is a method of evaluating the effect of a candidate bladder cancer drug comprising administering the drug to a patient and removing a cell sample from the patient. The expression profile of the cell is then determined. This method may further comprise comparing the expression profile to an expression profile of a healthy individual. In a preferred embodiment, said expression profile includes a gene of Tables 1A-13.

[0023] In one aspect, the present invention provides an isolated nucleic acid molecule consisting of a polynucleotide sequence as shown in Tables 1A-13.

[0024] In one embodiment, an expression vector or cell comprises the isolated nucleic acid.

[0025] In one aspect, the present invention provides an isolated polypeptide which is encoded by a nucleic acid molecule having polynucleotide sequence as shown in Tables 1A-13.

[0026] In another aspect, the present invention provides an antibody that specifically binds to an isolated polypeptide which is encoded by a nucleic acid molecule having polynucleotide sequence as shown in Tables 1A-13.

[0027] In one embodiment, the antibody is conjugated to an effector component, e.g., a fluorescent label, a radioisotope or a cytotoxic chemical.

[0028] In one embodiment, the antibody is an antibody fragment. In another embodiment, the antibody is humanized.

[0029] In one aspect, the present invention provides a method of detecting a bladder cancer cell in a biological sample from a patient, the method comprising contacting the biological sample with an antibody as described herein.

[0030] In another aspect, the present invention provides a method of detecting antibodies specific to bladder cancer in a patient, the method comprising contacting a biological sample from the patient with a polypeptide encoded by a nucleic acid comprising a sequence from Tables 1A-13.

[0031] In another aspect, the present invention provides a method for identifying a compound that modulates a bladder cancer-associated polypeptide, the method comprising the steps of: (i) contacting the compound with a bladder cancer-associated polypeptide, the polypeptide encoded by a polynucleotide that selectively hybridizes to a sequence at least 80% identical to a sequence as shown in Tables 1A-13; and (ii) determining the functional effect of the compound upon the polypeptide.

[0032] In one embodiment, the functional effect is a physical effect, an enzymatic effect, or a chemical effect.

[0033] In one embodiment, the polypeptide is expressed in a eukaryotic host cell or cell membrane. In another embodiment, the polypeptide is recombinant.

[0034] In one embodiment, the functional effect is determined by measuring ligand binding to the polypeptide.

[0035] In another aspect, the present invention provides a method of inhibiting proliferation of a bladder cancer-associated cell to treat bladder cancer in a patient, the method comprising the step of administering to the subject a therapeutically effective amount of a compound identified as described herein.

[0036] In one embodiment, the compound is an antibody.

[0037] In another aspect, the present invention provides a drug screening assay comprising the steps of: (i) administering a test compound to a mammal having bladder cancer or to a cell sample isolated therefrom; (ii) comparing the level of gene expression of a polynucleotide that selectively hybridizes to a sequence at least 80% identical to a sequence as shown in Tables 1A-13 in a treated cell or mammal with the level of gene expression of the polynucleotide in a control cell sample or mammal, wherein a test compound that modulates the level of expression of the polynucleotide is a candidate for the treatment of bladder cancer.

[0038] In one embodiment, the control is a mammal with bladder cancer or a cell sample therefrom that has not been treated with the test compound. In another embodiment, the control is a normal cell or mammal.

[0039] In one embodiment, the test compound is administered in varying amounts or concentrations. In another embodiment, the test compound is administered for varying time periods. In another embodiment, the comparison can occur after addition or removal of the drug candidate.

[0040] In one embodiment, the levels of a plurality of polynucleotides that selectively hybridize to a sequence at least 80% identical to a sequence as shown in Tables 1A-13 are individually compared to their respective levels in a control cell sample or mammal. In a preferred embodiment the plurality of polynucleotides is from three to ten.

[0041] In another aspect, the present invention provides a method for treating a mammal having bladder cancer comprising administering a compound identified by the assay described herein.

[0042] In another aspect, the present invention provides a pharmaceutical composition for treating a mammal having bladder cancer, the composition comprising a compound identified by the assay described herein and a physiologically acceptable excipient.

[0043] In one aspect, the present invention provides a method of screening drug candidates by providing a cell expressing a gene that is up- and down-regulated as in a bladder cancer. In one embodiment, a gene is selected from Tables 1A-13. The method further includes adding a drug candidate to the cell and determining the effect of the drug candidate on the expression of the expression profile gene.

[0044] In one embodiment, the method of screening drug candidates includes comparing the level of expression in the absence of the drug candidate to the level of expression in the presence of the drug candidate, wherein the concentration of the drug candidate can vary when present, and wherein the comparison can occur after addition or removal of the drug candidate. In a preferred embodiment, the cell expresses at least two expression profile genes. The profile genes may show an increase or decrease.

[0045] Also provided is a method of evaluating the effect of a candidate bladder cancer drug comprising administering the drug to a transgenic animal expressing or over-expressing the bladder cancer modulatory protein, or an animal lacking the bladder cancer modulatory protein, for example as a result of a gene knockout.

[0046] Moreover, provided herein is a biochip comprising one or more nucleic acid segments of Tables 1A-13, wherein the biochip comprises fewer than 1000 nucleic acid probes. Preferably, at least two nucleic acid segments are included. More preferably, at least three nucleic acid segments are included.

[0047] Furthermore, a method of diagnosing a disorder associated with bladder cancer is provided. The method comprises determining the expression of a gene of Tables 1A-13 in a first tissue type of a first individual, and comparing the distribution to the expression of the gene from a second normal tissue type from the first individual or a second unaffected individual. A difference in the expression indicates that the first individual has a disorder associated with bladder cancer.

[0048] In a further embodiment, the biochip also includes a polynucleotide sequence of a gene that is not up- and down-regulated in bladder cancer.

[0049] In one embodiment a method for screening for a bioactive agent capable of interfering with the binding of a bladder cancer modulating protein (bladder cancer modulatory protein) or a fragment thereof and an antibody which binds to said bladder cancer modulatory protein or fragment thereof. In a preferred embodiment, the method comprises combining a bladder cancer modulatory protein or fragment thereof, a candidate bioactive agent and an antibody which binds to said bladder cancer modulatory protein or fragment thereof. The method further includes determining the binding of said bladder cancer modulatory protein or fragment thereof and said antibody. Wherein there is a change in binding, an agent is identified as an interfering agent. The interfering agent can be an agonist or an antagonist. Preferably, the agent inhibits bladder cancer.

[0050] Also provided herein are methods of eliciting an immune response in an individual. In one embodiment a method provided herein comprises administering to an individual a composition comprising a bladder cancer modulating protein, or a fragment thereof. In another embodiment, the protein is encoded by a nucleic acid selected from those of Tables 1A-13.

[0051] Further provided herein are compositions capable of eliciting an immune response in an individual. In one embodiment, a composition provided herein comprises a bladder cancer modulating protein, preferably encoded by a nucleic acid of Tables 1A-13 or a fragment thereof, and a pharmaceutically acceptable carrier. In another embodiment, said composition comprises a nucleic acid comprising a sequence encoding a bladder cancer modulating protein, preferably selected from the nucleic acids of Tables 1A-13, and a pharmaceutically acceptable carrier.

[0052] Also provided are methods of neutralizing the effect of a bladder cancer protein, or a fragment thereof, comprising contacting an agent specific for said protein with said protein in an amount sufficient to effect neutralization. In another embodiment, the protein is encoded by a nucleic acid selected from those of Tables 1A-13.

[0053] In another aspect of the invention, a method of treating an individual for bladder cancer is provided. In one embodiment, the method comprises administering to said individual an inhibitor of a bladder cancer modulating protein. In another embodiment, the method comprises administering to a patient having bladder cancer an antibody to a bladder cancer modulating protein conjugated to a therapeutic moiety. Such a therapeutic moiety can be a cytotoxic agent or a radioisotope.

### DETAILED DESCRIPTION OF THE INVENTION

[0054] In accordance with the objects outlined above, the present invention provides novel methods for diagnosis and prognosis evaluation for bladder disease (BD), e.g., cancer, including metastatic bladder cancer, as well as methods for screening for compositions which modulate bladder diseases. Also provided are methods and compositions for treating bladder disease. Various related conditions where these markers may be useful also, include, e.g., carcinoma in situ, various stages of papillary carcinomas; and such conditions in different stages, layers, structural portions, etc.

[0055] Recent advances in molecular medicine, generally, have increased the interest in tumor-specific cell surface antigens that could serve as diagnostic or prognostic markers, or as targets for various immunotherapeutic or small molecule strategies. Antigens suitable for immunotherapeutic strategies should be highly expressed in cancer tissues and ideally not expressed in other, e.g., normal, adult tissues. Expression in tissues that are dispensable for life, however, may be tolerated, as a physiological consequence of such expression would be limited. Examples of such antigens in cancers other than bladder cancer include Her2/neu and the B-cell antigen CD20. Humanized monclonal antibodies directed to Her2/neu (Herceptin®/trastuzumab) are currently in use for the treatment of metastatic breast cancer. Ross and Fletcher (1998) Stem Cells 16:413-428. Similarly, anti-CD20 monoclonal antibodies (Rituxin®/rituximab) are used to effectively treat non-Hodgkin's lymphoma. Maloney, et al. (1997) Blood 90:2188-2195; and Leget and Czuczman (1998) Curr. Opin. Oncol. 10:548-551.

[0056] Definitions

[0057] The term “bladder cancer protein” or “bladder cancer polynucleotide” or “bladder cancer-associated transcript” refers to nucleic acid and polypeptide polymorphic variants, alleles, mutants, and interspecies homologues that: (1) have a nucleotide sequence that has greater than about 60% nucleotide sequence identity, 65%, 70%, 75%, 80%, 85%, 90%, preferably 91%, 92%, 93%, 94%, 95%, 96%, 97%, 98% or 99% or greater nucleotide sequence identity, preferably over a region of over a region of at least about 25, 50, 100, 200, 500, 1000, or more nucleotides, to a nucleotide sequence of or associated with a gene of Tables 1A-13; (2) bind to antibodies, e.g., polyclonal antibodies, raised against an immunogen comprising an amino acid sequence encoded by a nucleotide sequence of or associated with a gene of Tables 1A-13, and conservatively modified variants thereof; (3) specifically hybridize under stringent hybridization conditions to a nucleic acid sequence, or the complement thereof of Tables 1A-13 and conservatively modified variants thereof; or (4) have an amino acid sequence that has greater than about 60% amino acid sequence identity, 65%, 70%, 75%, 80%, 85%, 90%, preferably 91%, 92%, 93%, 94%, 95%, 96%, 97%, 98% or 99% or greater amino sequence identity, preferably over a region of over a region of at least about 25, 50, 100, 200, 500, 1000, or more amino acid, to an amino acid sequence encoded by a nucleotide sequence of or associated with a gene of Tables 1A-13. A polynucleotide or polypeptide sequence is typically from a mammal including, but not limited to, primate, e.g., human; rodent, e.g., rat, mouse, hamster; cow, pig, horse, sheep, or other mammal. A “bladder cancer polypeptide” and a “bladder cancer polynucleotide,” include both naturally occurring or recombinant forms.

[0058] A “full length” bladder cancer protein or nucleic acid refers to a bladder cancer polypeptide or polynucleotide sequence, or a variant thereof, that contains all of the elements normally contained in one or more naturally occurring, wild type bladder cancer polynucleotide or polypeptide sequences. The “full length” may be prior to, or after, various stages of splicing, including alternative splicing, or post-translation processing.

[0059] “Biological sample” as used herein is a sample of biological tissue or fluid, e.g., that contains nucleic acids or polypeptides of a bladder cancer protein, polynucleotide, or transcript. Such samples include, but are not limited to, tissue isolated from primates, e.g., humans, or rodents, e.g., mice and rats. Biological samples may also include sections of tissues such as biopsy and autopsy samples, frozen sections taken for histologic purposes, blood, plasma, serum, sputum, stool, urine, tears, mucus, hair, skin, etc. Biological samples also include explants and primary and/or transformed cell cultures derived from patient tissues. A biological sample is typically obtained from a eukaryotic organism, most preferably a mammal such as a primate, e.g., chimpanzee or human; cow; dog; cat; a rodent, e.g., guinea pig, rat, or mouse; rabbit; or a bird; reptile; or fish.

[0060] “Providing a biological sample” means to obtain a biological sample for use in methods described in this invention. Most often, this will be done by removing a sample of cells from an animal, but can also be accomplished by using previously isolated cells (e.g., isolated by another person, at another time, and/or for another purpose), or by performing the methods of the invention in vivo. Archival tissues, having treatment or outcome history, will be particularly useful.

[0061] The terms “identical” or percent “identity,” in the context of two or more nucleic acids or polypeptide sequences, refer to two or more sequences or subsequences that are the same or have a specified percentage of amino acid residues or nucleotides that are the same (e.g., about 60% identity, preferably 70%, 75%, 80%, 85%, 90%, 91%, 92%, 93%, 94%, 95%, 96%, 97%, 98%, 99%, or higher identity over a specified region, when compared and aligned for maximum correspondence over a comparison window or designated region) as measured using a BLAST or BLAST 2.0 sequence comparison algorithms with default parameters described below, or by manual alignment and visual inspection (see, e.g., NCBI web site http://www.ncbi.nlm.nih.gov/BLAST/ or the like). Such sequences are then said to be “substantially identical.” This definition also refers to, or may be applied to, the compliment of a test sequence. The definition also includes sequences that have deletions and/or additions, substitutions, naturally occurring variants, e.g., polymorphic or allelic, and manmade variants. As described below, the preferred algorithms can account for gaps and the like. Preferably, identity exists over a region that is at least about 25 amino acids or nucleotides in length, or more preferably over a region that is 50-100 amino acids or nucleotides in length.

[0062] For sequence comparison, typically one sequence acts as a reference sequence, to which test sequences are compared. When using a sequence comparison computer algorithm, test and reference sequences, subsequence coordinates, and sequence algorithm program parameters are typically designated. Default or alternative program parameters can be selected. The sequence comparison algorithm then calculates the percent sequence identities for the test sequences relative to the reference sequence, based on the program parameters.

[0063] A “comparison window”, as used herein, includes reference to a segment of one of the number of contiguous positions selected from the group consisting typically of from about 20-600, usually about 50-200, more usually about 100-150 in which a sequence may be compared to a reference sequence of the same number of contiguous positions after the two sequences are optimally aligned. Methods of alignment of sequences for comparison are well-known in the art. Optimal alignment of sequences for comparison can be conducted, by, e.g., the local homology algorithm of Smith and Waterman (1981) Adv. Appl. Math. 2:482, the homology alignment algorithm of Needleman and Wunsch (1970) J. Mol. Biol. 48:443-453, the search for similarity method of Pearson and Lipman (1988) Proc. Nat'l Acad. Sci. USA 85:2444-448, computerized implementations of these algorithms (GAP, BESTFIT, FASTA, and TFASTA in the Wisconsin Genetics Software Package, Genetics Computer Group, 575 Science Dr., Madison, Wis.), or manual alignment and visual inspection (see, e.g., Ausubel, et al. (eds. 1995 and supplements) Current Protocols in Molecular Biology Lippincott.

[0064] Preferred algorithms suitable for determining percent sequence identity and sequence similarity include the BLAST and BLAST 2.0 algorithms. See Altschul, et al. (1977) Nuc. Acids Res. 25:3389-3402; and Altschul, et al. (1990) J. Mol. Biol. 215:403-410. BLAST and BLAST 2.0 are used, with the parameters described herein, to determine percent sequence identity for the nucleic acids and proteins of the invention. Software for performing BLAST analyses is publicly available through the National Center for Biotechnology Information (http://www.ncbi.nlm.nih.gov/). This algorithm involves first identifying high scoring sequence pairs (HSPs) by identifying short words of length W in the query sequence, which either match or satisfy some positive-valued threshold score T when aligned with a word of the same length in a database sequence. T is referred to as the neighborhood word score threshold (Altschul, et al., supra). These initial neighborhood word hits act as seeds for initiating searches to find longer HSPs containing them. The word hits are extended in both directions along each sequence for as far as the cumulative alignment score can be increased. Cumulative scores are calculated using, e.g., for nucleotide sequences, the parameters M (reward score for a pair of matching residues; always >0) and N (penalty score for mismatching residues; always <0). For amino acid sequences, a scoring matrix is used to calculate the cumulative score. Extension of the word hits in each direction are halted when: the cumulative alignment score falls off by the quantity X from its maximum achieved value; the cumulative score goes to zero or below, due to the accumulation of one or more negative-scoring residue alignments; or the end of either sequence is reached. The BLAST algorithm parameters W, T, and X determine the sensitivity and speed of the alignment. The BLASTN program (for nucleotide sequences) uses as defaults a wordlength (W) of 11, an expectation (E) of 10, M=5, N=−4, and a comparison of both strands. For amino acid sequences, the BLASTP program uses as defaults a wordlength of 3, expectation (E) of 10, and the BLOSUM62 scoring matrix (see Henikoff and Henikoff (1989) Proc. Nat'l Acad. Sci. USA 89:10915-919) alignments (B) of 50, expectation (E) of 10, M=5, N=−4, and a comparison of both strands.

[0065] The BLAST algorithm also performs a statistical analysis of the similarity between two sequences (see, e.g., Karlin and Altschul (1993) Proc. Nat'l Acad. Sci. USA 90:5873-5787). One measure of similarity provided by the BLAST algorithm is the smallest sum probability (P(N)), which provides an indication of the probability by which a match between two nucleotide or amino acid sequences would occur by chance. For example, a nucleic acid is considered similar to a reference sequence if the smallest sum probability in a comparison of the test nucleic acid to the reference nucleic acid is less than about 0.2, more preferably less than about 0.01, and most preferably less than about 0.001. Log values may be large negative numbers, e.g., 5, 10, 20, 30, 40, 40, 70, 90, 110, 150, 170, etc.

[0066] An indication that two nucleic acid sequences or polypeptides are substantially identical is that the polypeptide encoded by the first nucleic acid is immunologically cross reactive with the antibodies raised against the polypeptide encoded by the second nucleic acid, as described below. Thus, a polypeptide is typically substantially identical to a second polypeptide, e.g., where the two peptides differ only by conservative substitutions. Another indication that two nucleic acid sequences are substantially identical is that the two molecules or their complements hybridize to each other under stringent conditions, as described below. Yet another indication that two nucleic acid sequences are substantially identical is that the same primers can be used to amplify the sequences.

[0067] A “host cell” is a naturally occurring cell or a transformed cell that contains an expression vector and supports the replication or expression of the expression vector. Host cells may be cultured cells, explants, cells in vivo, and the like. Host cells may be prokaryotic cells such as E. coli, or eukaryotic cells such as yeast, insect, amphibian, or mammalian cells such as CHO, HeLa, and the like (see, e.g., the American Type Culture Collection catalog or web site, www.atcc.org).

[0068] The terms “isolated,” “purified,” or “biologically pure” refer to material that is substantially or essentially free from components that normally accompany it as found in its native state. Purity and homogeneity are typically determined using analytical chemistry techniques such as polyacrylamide gel electrophoresis or high performance liquid chromatography. A protein or nucleic acid that is the predominant species present in a preparation is substantially purified. In particular, an isolated nucleic acid is separated from some open reading frames that naturally flank the gene and encode proteins other than protein encoded by the gene. The term “purified” in some embodiments typically denotes that a nucleic acid or protein gives rise to essentially one band in an electrophoretic gel. Preferably, it means that the nucleic acid or protein is at least 85% pure, more preferably at least 95% pure, and most preferably at least 99% pure. “Purify” or “purification” in other embodiments means removing at least one contaminant from the composition to be purified. In this sense, purification does not require that the purified compound be homogeneous, e.g., 100% pure.

[0069] The terms “polypeptide,” “peptide,” and “protein” are used interchangeably herein to refer to a polymer of amino acid residues. The terms apply to amino acid polymers in which at least one amino acid residue is an artificial chemical mimetic of a corresponding naturally occurring amino acid, as well as to naturally occurring amino acid polymers, those containing modified residues, and a non-naturally occurring amino acid polymer.

[0070] The term “amino acid” embraces naturally occurring or synthetic amino acids, amino acid analogs, and amino acid mimetics. Naturally occurring amino acids are those encoded by the genetic code, as well as those amino acids that are later modified, e.g., hydroxyproline, γ-carboxyglutamate, and O-phosphoserine. Amino acid analogs include compounds that share a basic chemical structure with a naturally occurring amino acid, e.g., an a carbon that is bound to a hydrogen, a carboxyl group, an amino group, or an R group, e.g., homoserine, norleucine, methionine sulfoxide, methionine methyl sulfonium. Such analogs may have modified R groups (e.g., norleucine) or modified peptide backbones, but share some basic chemical structure with a naturally occurring amino acid. Amino acid mimetics include chemical compounds that have a structure that is different from the general chemical structure of an amino acid, but that function similarly to a naturally occurring amino acid.

[0071] Amino acids may be referred to herein by their commonly known three letter symbols or by the one-letter symbols recommended by the IUPAC-IUB Biochemical Nomenclature Commission. Nucleotides, likewise, may be referred to by their commonly accepted single-letter codes.

[0072] “Conservatively modified variants” applies to amino acid or nucleic acid sequences. With respect to particular nucleic acid sequences, conservatively modified variants refers to those nucleic acids which encode identical or essentially identical amino acid sequences, or where the nucleic acid does not encode an amino acid sequence, to essentially identical or associated, e.g., naturally contiguous, sequences. Because of the degeneracy of the genetic code, a large number of functionally identical nucleic acids encode most proteins. For instance, the codons GCA, GCC, GCG, and GCU all encode the amino acid alanine. Thus, at each position where an alanine is specified by a codon, the codon can be altered to another of the corresponding codons described without altering the encoded polypeptide. Such nucleic acid variations are “silent variations,” which are one species of conservatively modified variations. Each nucleic acid sequence herein which encodes a polypeptide also describes silent variations of the nucleic acid. One of skill will recognize that in certain contexts each codon in a nucleic acid (except AUG, which is ordinarily the only codon for methionine, and TGG, which is ordinarily the only codon for tryptophan) can be modified to yield a functionally identical molecule. Accordingly, often silent variations of a nucleic acid which encodes a polypeptide is implicit in a described sequence with respect to the expression product, but not with respect to actual probe sequences.

[0073] As to amino acid sequences, one of skill will recognize that individual substitutions, deletions, or additions to a nucleic acid, peptide, polypeptide, or protein sequence which alters, adds, or deletes a single amino acid or a small percentage of amino acids in the encoded sequence is a “conservatively modified variant” where the alteration results in the substitution of an amino acid with a chemically similar amino acid. Conservative substitution tables providing functionally similar amino acids are well known in the art. Such conservatively modified variants are in addition to and do not exclude polymorphic variants, interspecies homologs, and alleles of the invention. Typically conservative substitutions for one another include: 1) Alanine (A), Glycine (G); 2) Aspartic acid (D), Glutamic acid (E); 3) Asparagine (N), Glutamine (Q); 4) Arginine (R), Lysine (K); 5) Isoleucine (I), Leucine (L), Methionine (M), Valine (V); 6) Phenylalanine (F), Tyrosine (Y), Tryptophan (W); 7) Serine (S), Threonine (T); and 8) Cysteine (C), Methionine (M). See, e.g., Creighton (1984) Proteins: Structure and Molecular Properties Freeman.

[0074] Macromolecular structures such as polypeptide structures can be described in terms of various levels of organization. See, e.g., Alberts, et al. (eds. 2001) Molecular Biology of the Cell (4th ed.) Garland; and Cantor and Schimmel (1980) Biophysical Chemistry Part I: The Conformation of Biological Macromolecules Freeman. “Primary structure” refers to the amino acid sequence of a particular peptide. “Secondary structure” refers to locally ordered, three dimensional structures within a polypeptide. These structures are commonly known as domains, which are portions of a polypeptide that often form a compact unit of the polypeptide, and are typically about 25-500 amino acids long. Typical domains are made of sections of lesser organization such as stretches of β-sheet and α-helices. “Tertiary structure” refers to the complete three dimensional structure of a polypeptide monomer. “Quaternary structure” refers to the three dimensional structure formed, usually by the non-covalent association of independent tertiary units. Anisotropic terms are also known as energy terms.

[0075] “Nucleic acid” or “oligonucleotide” or “polynucleotide” or grammatical equivalents used herein means at least two nucleotides covalently linked together. Oligonucleotides are typically from about 5, 6, 7, 8, 9, 10, 12, 15, 25, 30, 40, 50 or more nucleotides in length, up to about 100 nucleotides in length. Nucleic acids and polynucleotides are polymers, including longer lengths, e.g., 200, 300, 500, 1000, 2000, 3000, 5000, 7000, 10,000, etc. A nucleic acid of the present invention will generally contain phosphodiester bonds. In some cases, nucleic acid analogs are included that may have alternate backbones, e.g., phosphoramidate (Beaucage, et al. (1993) Tetrahedron 49:1925-963 and references therein; Letsinger (1970) J. Org. Chem. 35:3800-803; Sprinzl, et al. (1977) Eur. J. Biochem. 81:579-589; Letsinger, et al. (1986) Nucl. Acids Res. 14:3487-499; Sawai, et al. (1984) Chem. Lett. 805; Letsinger, et al. (1988) J. Am. Chem. Soc. 110:4470-471; and Pauwels, et al. (1986) Chemica Scripta 26:141-149); phosphorothioate (Mag, et al. (1991), Nucleic Acids Res. 19:1437-441; and U.S. Pat. No. 5,644,048); phosphorodithioate (Brill, et al. (1989) J. Am. Chem. Soc. 111:2321-322); O-methylphophoroamidite linkages (see Eckstein (1992) Oligonucleotides and Analogues: A Practical Approach Oxford Univ. Press); and peptide nucleic acid backbones and linkages (see Egholm (1992) J. Am. Chem. Soc. 114:1895-897; Meier, et al. (1992) Chem. Int. Ed. Engl. 31:1008-010; Nielsen (1993) Nature 365:566-568; Carlsson, et al. (1996) Nature 380:207. Other analog nucleic acids include those with positively charged backbones (Denpcy, et al. (1995) Proc. Nat'l Acad. Sci. USA 92:6097-101); non-ionic backbones (U.S. Pat. Nos. 5,386,023; 5,637,684; 5,602,240; 5,216,141; and 4,469,863; Kiedrowshi, et al. (1991) Angew. Chem. Intl. Ed. English 30:423-426; Letsinger, et al. (1988) J. Am. Chem. Soc. 110:4470-471; Jung, et al. (1994) Nucleoside and Nucleotide 13:1597-xxx; Chapters 2-3 of Sanghvi and Cook (eds. 1994) Carbohydrate Modifications in Antisense Research ACS Symposium Series 580; Mesmaeker, et al. (1994) Bioorganic and Medicinal Chem. Lett. 4:395-398; Jeffs, et al. (1994) J. Biomolecular NMR 34:17; Horn, et al. (1996) Tetrahedron Lett. 37:743-xxx); and non-ribose backbones (see U.S. Pat. Nos. 5,235,033 and 5,034,506, and Chapters 6-7 of Sanghvi and Cook (eds. 1994) Carbohydrate Modifications in Antisense Research ACS Symposium Series 580. Nucleic acids containing one or more carbocyclic sugars are also contemplated. See Jenkins and Turner (1995) Chem. Soc. Rev. 24:169-176. Several nucleic acid analogs are described in Rawls (page 35, Jun. 2, 1997) C&E News. Modifications of the ribose-phosphate backbone may be made, e.g., to increase the stability and half-life of such molecules in physiological environments or as probes on a biochip. Mixtures of naturally occurring nucleic acids and analogs can be made; alternatively, mixtures of different nucleic acid analogs, and mixtures of naturally occurring nucleic acids and analogs may be made.

[0076] Particularly preferred are peptide nucleic acids (PNA) which include peptide nucleic acid analogs. These backbones are substantially non-ionic under neutral conditions, in contrast to the highly charged phosphodiester backbone of naturally occurring nucleic acids. The PNA backbone typically exhibits improved hybridization kinetics, exhibiting larger changes in the melting temperature (Tₘ) for mismatched versus perfectly matched basepairs. DNA and RNA typically exhibit a 2-4° C. drop in Tₘ for an internal mismatch. With the non-ionic PNA backbone, the drop is closer to 7-9° C. And due to their non-ionic nature, hybridization of the polymers is relatively insensitive to salt concentration. In addition, PNAs are not as easily degraded by cellular enzymes, and can be more stable.

[0077] The nucleic acids may be single stranded or double stranded, or contain portions of both double stranded or single stranded sequence. As will be appreciated by those in the art, the depiction of a single strand also defines the sequence of the complementary strand; thus the sequences described herein also provide the complement of the sequence. The nucleic acid may be DNA, both genomic and cDNA, RNA, or a hybrid, where the nucleic acid may contain combinations of deoxyribo- and ribo-nucleotides, and combinations of bases, including uracil, adenine, thymine, cytosine, guanine, inosine, xanthine, hypoxanthine, isocytosine, isoguanine, etc. “Transcript” typically refers to a naturally occurring RNA, e.g., a pre-mRNA, hnRNA, or mRNA. As used herein, the term “nucleoside” includes nucleotides and nucleoside and nucleotide analogs, and modified nucleosides such as amino modified nucleosides. In addition, “nucleoside” includes non-naturally occurring analog structures. Thus, e.g., the individual units of a peptide nucleic acid, each containing a base, are referred to herein as a nucleoside.

[0078] A “label” or “detectable moiety” is a composition detectable by spectroscopic, photochemical, biochemical, immunochemical, chemical, or other physical means. Direct or indirect methods are comtemplated. For example, useful labels include ³²P, fluorescent dyes, electron-dense reagents, enzymes (e.g., as commonly used in an ELISA), biotin, digoxigenin, or haptens and proteins or other entities which can be made detectable, e.g., by incorporating a radiolabel into the peptide or used to detect antibodies specifically reactive with the peptide. The labels may be incorporated into the bladder cancer nucleic acids, proteins, and antibodies. Methods are well known for conjugating the antibody to the label, including those methods described by Hunter, et al. (1962) Nature 144:945-946; David, et al. (1974) Biochemistry 13:1014-021; Pain, et al. (1981) J. Immunol. Meth. 40:219-230; and Nygren (1982) J. Histochem, and Cytochem. 30:407-412.

[0079] An “effector” or “effector moiety” or “effector component” is a molecule that is bound (or linked, or conjugated), either covalently, through a linker or a chemical bond, or noncovalently, through ionic, van der Waals, electrostatic, or hydrogen bonds, to a target, e.g., an antibody. The “effector” can be a variety of molecules including, e.g., detection moieties including radioactive compounds; fluorescent compounds; an enzyme or substrate; tags such as epitope tags; a toxin; activatable moieties; a chemotherapeutic agent; a lipase; an antibiotic; a radioisotope emitting “hard”, e.g., beta radiation; or an attracting moiety.

[0080] A “labeled nucleic acid probe or oligonucleotide” is one that is bound, either covalently, through a linker or a chemical bond, or noncovalently, through ionic, van der Waals, electrostatic, or hydrogen bonds to a label such that the presence of the probe may be detected by detecting the presence of the label bound to the probe. Alternatively, method using high affinity interactions may achieve the same results where one of a pair of binding partners binds to the other, e.g., biotin, streptavidin.

[0081] As used herein a “nucleic acid probe or oligonucleotide” is defined as a nucleic acid capable of binding to a target nucleic acid of complementary sequence through one or more types of chemical bonds, usually through complementary base pairing, usually through hydrogen bond formation. As used herein, a probe may include natural (e.g., A, G, C, or T) or modified bases (7-deazaguanosine, inosine, etc.). In addition, the bases in a probe may be joined by a linkage other than a phosphodiester bond, so long as it does not functionally interfere with hybridization. Thus, e.g., probes may be peptide nucleic acids in which the constituent bases are joined by peptide bonds rather than phosphodiester linkages. Probes may bind target sequences lacking complete complementarity with the probe sequence depending upon the stringency of the hybridization conditions. The probes are preferably directly labeled as with isotopes, chromophores, lumiphores, chromogens, or indirectly labeled such as with biotin to which streptavidin linked label may bind. By assaying for the presence or absence of the probe, one can detect the presence or absence of the select sequence or subsequence. Diagnosis or prognosis may be based at the genomic level, or at the level of RNA or protein expression.

[0082] The term “recombinant” when used with reference, e.g., to a cell, or nucleic acid, protein, or vector, indicates that the cell, nucleic acid, protein or vector, has been modified by the introduction of a heterologous nucleic acid or protein or the alteration of a native nucleic acid or protein, or that the cell is derived from a cell so modified. Thus, e.g., recombinant cells express genes that are not found within the native (non-recombinant) form of the cell or express native genes that are otherwise abnormally expressed, under expressed, or not expressed at all. By the term “recombinant nucleic acid” herein is meant nucleic acid, originally formed in vitro, in general, by the manipulation of nucleic acid, e.g., using polymerases and endonucleases, in a form not normally found in nature. In this manner, operable linkage of different sequences is achieved. Thus an isolated nucleic acid, in a linear form, or an expression vector formed in vitro by ligating DNA molecules that are not normally joined, are both considered recombinant for the purposes of this invention. It is understood that once a recombinant nucleic acid is made and reintroduced into a host cell or organism, it will replicate non-recombinantly, e.g., using in vivo cellular machinery of the host cell rather than in vitro manipulations; however, such nucleic acids, once produced recombinantly, although subsequently replicated non-recombinantly, are still considered recombinant for the purposes of the invention. Similarly, a “recombinant protein” is a protein made using recombinant techniques, e.g., through the expression of a recombinant nucleic acid as depicted above.

[0083] The term “heterologous” when used with reference to portions of a nucleic acid indicates that the nucleic acid comprises two or more subsequences that are not normally found in the same relationship to each other in nature. For instance, the nucleic acid is typically recombinantly produced, having two or more sequences, e.g., from unrelated genes arranged to make a new functional nucleic acid, e.g., a promoter from one source and a coding region from another source. Similarly, a heterologous protein will often refer to two or more subsequences that are not found in the same relationship to each other in nature (e.g., a fusion protein).

[0084] A “promoter” is defined as an array of nucleic acid control sequences that direct transcription of a nucleic acid. As used herein, a promoter includes necessary nucleic acid sequences near the start site of transcription, such as, in the case of a polymerase II type promoter, a TATA element. A promoter also optionally includes distal enhancer or repressor elements, which can be located as much as several thousand base pairs from the start site of transcription. A “constitutive” promoter is a promoter that is active under most environmental and developmental conditions. An “inducible” promoter is a promoter that is active under environmental or developmental regulation. The term “operably linked” refers to a functional linkage between a nucleic acid expression control sequence (such as a promoter, or array of transcription factor binding sites) and a second nucleic acid sequence, wherein the expression control sequence directs transcription of the nucleic acid corresponding to the second sequence.

[0085] An “expression vector” is a nucleic acid construct, generated recombinantly or synthetically, with a series of specified nucleic acid elements that permit transcription of a particular nucleic acid in a host cell. The expression vector can be part of a plasmid, virus, or nucleic acid fragment. Typically, the expression vector includes a nucleic acid to be transcribed operably linked to a promoter.

[0086] The phrase “selectively (or specifically) hybridizes to” refers to the binding, duplexing, or hybridizing of a molecule only to a particular nucleotide sequence under stringent hybridization conditions when that sequence is present in a complex mixture (e.g., total cellular or library DNA or RNA).

[0087] The phrase “stringent hybridization conditions” refers to conditions under which a probe will hybridize to its target subsequence, typically in a complex mixture of nucleic acids, but to no other sequences. Stringent conditions are sequence-dependent and will be different in different circumstances. Longer sequences hybridize specifically at higher temperatures. An extensive guide to the hybridization of nucleic acids is found in “Overview of principles of hybridization and the strategy of nucleic acid assays” in Tijssen (1993) Hybridization with Nucleic Probes (Techniques in Biochemistry and Molecular Biology; vol. 24) Elsevier. Generally, stringent conditions are selected to be about 5-10° C. lower than the thermal melting point (Tₘ) for the specific sequence at a defined ionic strength pH. The Tₘ is the temperature (under defined ionic strength, pH, and nucleic acid concentration) at which 50% of the probes complementary to the target hybridize to the target sequence at equilibrium (as the target sequences are present in excess, at Tₘ, 50% of the probes are occupied at equilibrium). Stringent conditions will be those in which the salt concentration is less than about 1.0 M sodium ion, typically about 0.01 to 1.0 M sodium ion concentration (or other salts) at pH 7.0 to 8.3 and the temperature is at least about 30° C. for short probes (e.g., about 10-50 nucleotides) and at least about 60° C. for long probes (e.g., greater than about 50 nucleotides). Stringent conditions may also be achieved with the addition of destabilizing agents such as formamide. For selective or specific hybridization, a positive signal is at least about two times background, preferably about 10 times background hybridization. Exemplary stringent hybridization conditions can be as following: 50% formamide, 5×SSC, and 1% SDS, incubating at 42° C., or, 5×SSC, 1% SDS, incubating at 65° C., with wash in 0.2×SSC, and 0.1% SDS at 65° C. For PCR, a temperature of about 36° C. is typical for low stringency amplification, although annealing temperatures may vary between about 32-48° C. depending on primer length. For high stringency PCR amplification, a temperature of about 62° C. is typical, although high stringency annealing temperatures can range from about 50-65° C., depending on the primer length and specificity. Typical cycle conditions for both high and low stringency amplifications include a denaturation phase of 90-95° C. for 30-120 sec, an annealing phase lasting 30-120 sec, and an extension phase of about 72° C. for 1-2 min. Protocols and guidelines for low and high stringency amplification reactions are provided, e.g., in Innis, et al. (1990) PCR Protocols, A Guide to Methods and Applications Academic Press NY.

[0088] Nucleic acids that do not hybridize to each other under stringent conditions are still substantially identical if the polypeptides which they encode are substantially identical. This occurs, e.g., when a copy of a nucleic acid is created using the maximum codon degeneracy permitted by the genetic code. In such cases, the nucleic acids typically hybridize under moderately stringent hybridization conditions. Exemplary “moderately stringent hybridization conditions” include a hybridization in a buffer of 40% formamide, 1 M NaCl, 1% SDS at 37° C., and a wash in 1×SSC at 45° C. A positive hybridization is at least about twice background. Alternative hybridization and wash conditions can be utilized to provide conditions of similar stringency. Additional guidelines for determining hybridization parameters are provided in numerous references, e.g.,. Ausubel, et al. Current Protocols in Molecular Biology Lippincott.

[0089] The phrase “functional effects” in the context of assays for testing compounds that modulate activity of a bladder cancer protein includes the determination of a parameter that is indirectly or directly under the influence of the bladder cancer protein or nucleic acid, e.g., a functional, physical, or chemical effect, such as the ability to decrease bladder cancer. It includes ligand binding activity; cell growth on soft agar; anchorage dependence; contact inhibition and density limitation of growth; cell viability, cellular proliferation; cellular transformation; growth factor or serum dependence; tumor specific marker levels; invasiveness into Matrigel; tumor growth and metastasis in vivo; mRNA and protein expression in cells undergoing metastasis, and other characteristics of bladder cancer cells. “Functional effects” include in vitro, in vivo, and ex vivo activities.

[0090] By “determining the functional effect” is meant assaying for a compound that increases or decreases a parameter that is indirectly or directly under the influence of a bladder cancer protein sequence, e.g., functional, enzymatic, physical and chemical effects. Such functional effects can be measured by many means known to those skilled in the art, e.g., changes in spectroscopic characteristics (e.g., fluorescence, absorbance, refractive index), hydrodynamic (e.g., shape), chromatographic, or solubility properties for the protein, measuring inducible markers or transcriptional activation of the bladder cancer protein; measuring binding activity or binding assays, e.g., binding to antibodies or other ligands, and measuring cellular proliferation or metabolism. Determination of the functional effect of a compound on bladder cancer can also be performed using bladder cancer assays, such as, in vitro assays, e.g., cell growth on soft agar; anchorage dependence; contact inhibition and density limitation of growth; cellular proliferation; cellular transformation; growth factor or serum dependence; tumor specific marker levels; invasiveness into Matrigel; tumor growth and metastasis in vivo; mRNA and protein expression in cells undergoing metastasis, and other characteristics of bladder cancer cells. Functional effects can be evaluated by many means, e.g., microscopy for quantitative or qualitative measures of alterations in morphological features, measurement of changes in RNA or protein levels for bladder cancer-associated sequences, measurement of RNA stability, identification of downstream or reporter gene expression (CAT, luciferase, β-gal, GFP, and the like), e.g., via chemiluminescence, fluorescence, calorimetric reactions, antibody binding, inducible markers, and ligand binding assays.

[0091] “Inhibitors”, “activators”, and “modulators” of bladder cancer polynucleotide and polypeptide sequences are used to refer to activating, inhibitory, or modulating molecules or compounds identified using in vitro and in vivo assays of bladder cancer polynucleotide and polypeptide sequences. Inhibitors are compounds that, e.g., bind to, partially or totally block activity, decrease, prevent, delay activation, inactivate, desensitize, or down regulate the activity or expression of bladder cancer proteins, e.g., antagonists. Antisense nucleic acids may seem to inhibit expression and subsequent function of the protein. “Activators” are compounds that increase, open, activate, facilitate, enhance activation, sensitize, agonize, or up regulate bladder cancer protein activity. Inhibitors, activators, or modulators also include genetically modified versions of bladder cancer proteins, e.g., versions with altered activity, as well as naturally occurring and synthetic ligands, antagonists, agonists, antibodies, small chemical molecules and the like. Such assays for inhibitors and activators include, e.g., expressing the bladder cancer protein in vitro, in cells, or cell membranes, applying putative modulator compounds, and then determining the functional effects on activity, as described above. Activators and inhibitors of bladder cancer can also be identified by incubating bladder cancer cells with the test compound and determining increases or decreases in the expression of 1 or more bladder cancer proteins, e.g., 1, 2, 3, 4, 5, 10, 15, 20, 25, 30, 40, 50 or more bladder cancer proteins, such as bladder cancer proteins encoded by the sequences set out in Tables 1A-13.

[0092] Samples or assays comprising bladder cancer proteins that are treated with a potential activator, inhibitor, or modulator are compared to control samples without the inhibitor, activator, or modulator to examine the extent of inhibition. Control samples (untreated with inhibitors) are assigned a relative protein activity value of 100%. Inhibition of a polypeptide is achieved when the activity value relative to the control is about 80%, preferably about 50%, more preferably about 25-0%. Activation of a bladder cancer polypeptide is achieved when the activity value relative to the control (untreated with activators) is about 110%, more preferably about 150%, more preferably about 200-500% (e.g., two to five fold higher relative to the control), more preferably about 1000-3000% higher.

[0093] The phrase “changes in cell growth” refers to a change in cell growth and proliferation characteristics in vitro or in vivo, such as cell viability, formation of foci, anchorage independence, semi-solid or soft agar growth, changes in contact inhibition and density limitation of growth, loss of growth factor or serum requirements, changes in cell morphology, gaining or losing immortalization, gaining or losing tumor specific markers, ability to form or suppress tumors when injected into suitable animal hosts, and/or immortalization of the cell. See, e.g., pp. 231-241 of Freshney (1994) Culture of Animal Cells: A Manual of Basic Technique (3d ed.).

[0094] “Tumor cell” refers to precancerous, cancerous, and normal cells in a tumor.

[0095] “Cancer cells,” “transformed” cells or “transformation” in tissue culture, refers to spontaneous or induced phenotypic changes that do not necessarily involve the uptake of new genetic material. Although transformation can arise from infection with a transforming virus and incorporation of new genomic DNA, or uptake of exogenous DNA, it can also arise spontaneously or following exposure to a carcinogen, thereby mutating an endogenous gene. Transformation is associated with phenotypic changes, such as immortalization of cells, aberrant growth control, nonmorphological changes, and/or malignancy. See, Freshney (2000) Culture of Animal Cells: A Manual of Basic Technique (4th ed.) Wiley-Liss.

[0096] “Antibody” refers to a polypeptide comprising a framework region from an immunoglobulin gene or fragments thereof that specifically binds and recognizes an antigen. The recognized immunoglobulin genes include the kappa, lambda, alpha, gamma, delta, epsilon, and mu constant region genes, as well as the myriad immunoglobulin variable region genes. Light chains are classified as either kappa or lambda. Heavy chains are classified as gamma, mu, alpha, delta, or epsilon, which in turn define the immunoglobulin classes, IgG, IgM, IgA, IgD and IgE, respectively. Typically, the antigen-binding region of an antibody or its functional equivalent will be most critical in specificity and affinity of binding. See Paul (ed. 1999) Fundamental Immunology (4th ed.) Raven.

[0097] An exemplary immunoglobulin (antibody) structural unit comprises a tetramer. Each tetramer is composed of two identical pairs of polypeptide chains, each pair having one “light” (about 25 kD) and one “heavy” chain (about 50-70 kD). The N-terminus of each chain defines a variable region of about 100 to 110 or more amino acids primarily responsible for antigen recognition. The terms variable light chain (V_{L}) and variable heavy chain (V_{H}) refer to these light and heavy chains respectively.

[0098] Antibodies exist, e.g., as intact immunoglobulins or as a number of well-characterized fragments produced by digestion with various peptidases. Thus, e.g., pepsin digests an antibody below the disulfide linkages in the hinge region to produce F(ab)′₂, a dimer of Fab which itself is a light chain joined to V_{H}-C_{H}1 by a disulfide bond. The F(ab)′₂ may be reduced under mild conditions to break the disulfide linkage in the hinge region, thereby converting the F(ab)′₂ dimer into an Fab′ monomer. The Fab′ monomer is essentially Fab with part of the hinge region. See Paul (ed. 1999) Fundamental Immunology (4th ed.) Raven. While various antibody fragments are defined in terms of the digestion of an intact antibody, such fragments may be synthesized de novo either chemically or by using recombinant DNA methodology. Thus, the term antibody, as used herein, also includes antibody fragments either produced by the modification of whole antibodies, or those synthesized de novo using recombinant DNA methodologies (e.g., single chain Fv) or those identified using phage display libraries. See, e.g., McCafferty, et al. (1990) Nature 348:552-554.

[0099] For preparation of antibodies, e.g., recombinant, monoclonal, or polyclonal antibodies, many techniques can be used. See, e.g., Kohler and Milstein (1975) Nature 256:495-497; Kozbor, et al. (1983) Immunology Today 4:72; Cole, et al. pp. 77-96 in Reisfeld and Sell (1985) Monoclonal Antibodies and Cancer Therapy Liss; Coligan (1991) Current Protocols in Immunology Lippincott; Harlow and Lane (1988) Antibodies: A Laboratory Manual CSH Press; and Goding (1986) Monoclonal Antibodies: Principles and Practice (2d ed.) Academic Press. Techniques for the production of single chain antibodies (U.S. Pat. No. 4,946,778) can be adapted to produce antibodies to polypeptides of this invention. Also, transgenic mice, or other organisms such as other mammals, may be used to express humanized antibodies. Alternatively, phage display technology can be used to identify antibodies and heteromeric Fab fragments that specifically bind to selected antigens. See, e.g., McCafferty, et al. (1990) Nature 348:552-554; and Marks, et al. (1992) Biotechnology 10:779-783.

[0100] A “chimeric antibody” is an antibody molecule in which (a) the constant region, or a portion thereof, is altered, replaced, or exchanged so that the antigen binding site (variable region) is linked to a constant region of a different or altered class, effector function, and/or species, or an entirely different molecule which confers new properties to the chimeric antibody, e.g., an enzyme, toxin, hormone, growth factor, drug, etc.; or (b) the variable region, or a portion thereof, is altered, replaced, or exchanged with a variable region having a different or altered antigen specificity.

[0101] Identification of Bladder Cancer-Associated Sequences

[0102] In one aspect, the expression levels of genes are determined in different patient samples for which diagnosis information is desired, to provide expression profiles. An expression profile of a particular sample is essentially a “fingerprint” of the state of the sample; while two states may have a particular gene similarly expressed, the evaluation of a number of genes simultaneously allows the generation of a gene expression profile that is characteristic of the state of the cell. That is, normal tissue (e.g., normal bladder or other tissue) may be distinguished from cancerous or metastatic cancerous tissue of the bladder, or bladder cancer tissue or metastatic bladder cancerous tissue can be compared with tissue samples of bladder and other tissues from surviving cancer patients. By comparing expression profiles of tissue in known different bladder cancer states, information regarding which genes are important (including both up- and down-regulation of genes) in each of these states is obtained.

[0103] The identification of sequences that are differentially expressed in bladder cancer versus non-bladder cancer tissue allows the use of this information in a number of ways. For example, a particular treatment regime may be evaluated: does a chemotherapeutic drug act to down-regulate bladder cancer, and thus tumor growth or recurrence, in a particular patient; or does chemotherapy or radiation therapy induce expression of particular targets. Similarly, diagnosis and treatment outcomes may be done or confirmed by comparing patient samples with the known expression profiles. Metastatic tissue can also be analyzed to determine the stage of bladder cancer in the tissue or origin of a primary tumor. Furthermore, these gene expression profiles (or individual genes) allow screening of drug candidates with an eye to mimicking or altering a particular expression profile; e.g., screening can be done for drugs that suppress the bladder cancer expression profile. This may be done by making biochips comprising sets of important bladder cancer genes, which can then be used in these screens. These methods can also be applied on the protein basis; that is, protein expression levels of the bladder cancer proteins can be evaluated for diagnostic purposes or to screen candidate agents. In addition, the bladder cancer nucleic acid sequences can be administered for gene therapy purposes, including the administration of antisense or inhibitory nucleic acids, or the bladder cancer proteins (including antibodies and other modulators thereof) administered as therapeutic drugs.

[0104] Thus the present invention provides nucleic acid and protein sequences that are differentially expressed in bladder disease or cancer relative to normal tissues and/or non-malignant bladder tissue, herein termed “bladder cancer sequences.” As outlined below, bladder cancer sequences include those that are up-regulated (e.g., expressed at a higher level) in bladder cancer, as well as those that are down-regulated (e.g., expressed at a lower level). In a preferred embodiment, the bladder cancer sequences are from humans; however, as will be appreciated by those in the art, bladder cancer sequences from other organisms may be useful in animal models of disease and drug evaluation; thus, other bladder cancer sequences are provided, from vertebrates, including mammals, including rodents (rats, mice, hamsters, guinea pigs, etc.), primates, farm animals (including sheep, goats, pigs, cows, horses, etc.) and pets, e.g., (dogs, cats, etc.). Bladder cancer sequences from other organisms may be obtained using the techniques outlined below.

[0105] Bladder cancer sequences can include both nucleic acid and amino acid sequences. Bladder cancer nucleic acid sequences are useful in a variety of applications, including diagnostic applications, which will detect naturally occurring nucleic acids, as well as screening applications. Biochips comprising nucleic acid probes or PCR microtiter plates with selected probes to the bladder cancer sequences can be generated.

[0106] A bladder cancer sequence can be initially identified by substantial nucleic acid and/or amino acid sequence homology to the bladder cancer sequences outlined herein. Such homology can be based upon the overall nucleic acid or amino acid sequence, and is generally determined as outlined below, using either homology programs or hybridization conditions.

[0107] For identifying bladder cancer-associated sequences, the bladder cancer screen typically includes comparing genes identified in different tissues, e.g., normal, non-malignant, or cancerous tissues, or tumor tissue samples from patients who have metastatic disease vs. non metastatic tissue. Other suitable tissue comparisons include comparing bladder cancer samples with metastatic cancer samples from other cancers, such as lung, bladder, gastrointestinal cancers, ovarian, etc. Samples of different stages of bladder cancer, e.g., survivor tissue, drug resistant states, and tissue undergoing metastasis, are applied to biochips comprising nucleic acid probes. The samples are first microdissected, if applicable, and treated for the preparation of mRNA. Suitable biochips are commercially available, e.g., from Affymetrix. Gene expression profiles as described herein are generated and the data analyzed.

[0108] In one embodiment, genes showing changes in expression as between normal and disease states are compared to genes expressed in other normal tissues, preferably normal bladder, but also including, and not limited to lung, heart, brain, liver, bladder, kidney, muscle, colon, small intestine, large intestine, spleen, bone, and placenta. In a preferred embodiment, those genes identified during the bladder cancer screen that are expressed in a significant amount in other tissues are removed from the profile, although in some embodiments, this is not necessary. That is, when screening for drugs, it is usually preferable that the target be disease specific, e.g., not be expressed on critical organs.

[0109] In a preferred embodiment, bladder cancer sequences are those that are up-regulated in bladder cancer; that is, the expression of these genes is higher in the bladder cancer tissue as compared to non-cancerous tissue. “Up-regulation” as used herein often means at least about a two-fold change, preferably at least about a three fold change, with at least about five-fold or higher being preferred. Unigene cluster identification numbers and accession numbers herein are for the GenBank sequence database and sequences of accession numbers are hereby expressly incorporated by reference. GenBank is known in the art, see, e.g., Benson, et al. (1998) Nuc. Acids Res. 26:1-7 and http://www.ncbi.nlm.nih.gov/. Sequences are also available in other databases, e.g., European Molecular Biology Laboratory (EMBL) and DNA Database of Japan (DDBJ).

[0110] In another preferred embodiment, bladder cancer sequences are those that are down-regulated in the bladder cancer; that is, the expression of these genes is lower in bladder cancer tissue as compared to non-cancerous tissue (see, e.g., Tables 1A-13). “Downregulation” as used herein often means at least about a two-fold change, preferably at least about a three fold change, with at least about five-fold or higher being preferred.

[0111] Informatics

[0112] The ability to identify genes that are over or under expressed in bladder cancer can additionally provide high-resolution, high-sensitivity datasets which can be used in the areas of diagnostics, therapeutics, drug development, pharmacogenetics, protein structure, biosensor development, and other related areas. For example, the expression profiles can be used in diagnostic or prognostic evaluation of patients with bladder cancer. Or as another example, subcellular toxicological information can be generated to better direct drug structure and activity correlation. See Anderson (Jun. 11-12, 1998) Pharmaceutical Proteomics: Targets, Mechanism, and Function, paper presented at the IBC Proteomics conference, Coronado, Calif. Subcellular toxicological information can also be utilized in a biological sensor device to predict the likely toxicological effect of chemical exposures and likely tolerable exposure thresholds (see U.S. Pat. No. 5,811,231). Similar advantages accrue from datasets relevant to other biomolecules and bioactive agents (e.g., nucleic acids, saccharides, lipids, drugs, and the like).

[0113] Thus, in another embodiment, the present invention provides a database that includes at least one set of assay data. The data contained in the database is acquired, e.g., using array analysis either singly or in a library format. The database can be in a form in which data can be maintained and transmitted, but is preferably an electronic database. The electronic database of the invention can be maintained on an electronic device allowing for the storage of and access to the database, such as a personal computer, but is preferably distributed on a wide area network, such as the World Wide Web.

[0114] The focus of the present section on databases that include peptide sequence data is for clarity of illustration only. It will be apparent that similar databases can be assembled for assay data acquired using an assay of the invention.

[0115] The compositions and methods for identifying and/or quantitating the relative and/or absolute abundance of a variety of molecular and macromolecular species from a biological sample undergoing bladder cancer, e.g., the identification of bladder cancer-associated sequences described herein, provide an abundance of information, which can be correlated with pathological conditions, predisposition to disease, drug testing, therapeutic monitoring, gene-disease causal linkages, identification of correlates of immunity and physiological status, among others. Although the data generated from the assays of the invention is suited for manual review and analysis, in a preferred embodiment, prior data processing using high-speed computers is utilized.

[0116] An array of methods for indexing and retrieving biomolecular information is known in the art. For example, U.S. Pat. Nos. 6,023,659 and 5,966,712 disclose a relational database system for storing biomolecular sequence information in a manner that allows sequences to be catalogued and searched according to one or more protein function hierarchies. U.S. Pat. No. 5,953,727 discloses a relational database having sequence records containing information in a format that allows a collection of partial-length DNA sequences to be catalogued and searched according to association with one or more sequencing projects for obtaining full-length sequences from the collection of partial length sequences. U.S. Pat. No. 5,706,498 discloses a gene database retrieval system for making a retrieval of a gene sequence similar to a sequence data item in a gene database based on the degree of similarity between a key sequence and a target sequence. U.S. Pat. No. 5,538,897 discloses a method using mass spectroscopy fragmentation patterns of peptides to identify amino acid sequences in computer databases by comparison of predicted mass spectra with experimentally-derived mass spectra using a closeness-of-fit measure. U.S. Pat. No. 5,926,818 discloses a multi-dimensional database comprising a functionality for multi-dimensional data analysis described as on-line analytical processing (OLAP), which entails the consolidation of projected and actual data according to more than one consolidation path or dimension. U.S. Pat. No. 5,295,261 reports a hybrid database structure in which the fields of each database record are divided into two classes, navigational and informational data, with navigational fields stored in a hierarchical topological map which can be viewed as a tree structure or as the merger of two or more such tree structures.

[0117] See also Mount, et al. (2001) Bioinformatics CSH Press, NY; Durbin, et al. (eds. 1999) Biological Sequence Analysis: Probabilistic Models of Proteins and Nucleic Acids Cambridge Univ. Press; Baxevanis and Oeullette (eds. 1998) Bioinformatics: A Practical Guide to the Analysis of Genes and Proteins (2d. ed.) Wiley-Liss; Rashidi and Buehler (1999) Bioinformatics: Basic Applications in Biological Science and Medicine CRC Press; Setubal, et al. (eds 1997) Introduction to Computational Molecular Biology Brooks/Cole; Misener and Krawetz (eds. 2000) Bioinformatics: Methods and Protocols Oxford Univ. Press; Higgins and Taylor (eds. 2000) Bioinformatics: Sequence, Structure, and Databanks: A Practical Approach Oxford Univ. Press; Brown (2001) Bioinformatics: A Biologist's Guide to Biocomputing and the Internet Eaton Pub.; Han and Kamber (2000) Data Mining: Concepts and Techniques Kaufmann Pub.; and Waterman (1995) Introduction to Computational Biology: Maps, Sequences, and Genomes Chap and Hall.

[0118] The present invention provides a computer database comprising a computer and software for storing in computer-retrievable form assay data records cross-tabulated, e.g., with data specifying the source of the target-containing sample from which each sequence specificity record was obtained.

[0119] In an exemplary embodiment, at least one of the sources of target-containing sample is from a control tissue sample known to be free of pathological disorders. In a variation, at least one of the sources is a known pathological tissue specimen, e.g., a neoplastic lesion or another tissue specimen to be analyzed for bladder cancer. In another variation, the assay records cross-tabulate one or more of the following parameters for each target species in a sample: (1) a unique identification code, which can include, e.g., a target molecular structure and/or characteristic separation coordinate (e.g., electrophoretic coordinates); (2) sample source; and (3) absolute and/or relative quantity of the target species present in the sample.

[0120] The invention also provides for the storage and retrieval of a collection of target data in a computer data storage apparatus, which can include magnetic disks, optical disks, magneto-optical disks, DRAM, SRAM, SGRAM, SDRAM, RDRAM, DDR RAM, magnetic bubble memory devices, and other data storage devices, including CPU registers and on-CPU data storage arrays. Typically, the target data records are stored as a bit pattern in an array of magnetic domains on a magnetizable medium or as an array of charge states or transistor gate states, such as an array of cells in a DRAM device (e.g., each cell comprised of a transistor and a charge storage area, which may be on the transistor). In one embodiment, the invention provides such storage devices, and computer systems built therewith, comprising a bit pattern encoding a protein expression fingerprint record comprising unique identifiers for at least 10 target data records cross-tabulated with target source.

[0121] When the target is a peptide or nucleic acid, the invention preferably provides a method for identifying related peptide or nucleic acid sequences, comprising performing a computerized comparison between a peptide or nucleic acid sequence assay record stored in or retrieved from a computer storage device or database and at least one other sequence. The comparison can include a sequence analysis or comparison algorithm or computer program embodiment thereof (e.g., FASTA, TFASTA, GAP, BESTFIT) and/or the comparison may be of the relative amount of a peptide or nucleic acid sequence in a pool of sequences determined from a polypeptide or nucleic acid sample of a specimen.

[0122] The invention also preferably provides a magnetic disk, such as an IBM-compatible (DOS, Windows, Windows95/98/2000, Windows NT, OS/2) or other format (e.g., Linux, SunOS, Solaris, AIX, SCO Unix, VMS, MV, Macintosh, etc.) floppy diskette or hard (fixed, Winchester) disk drive, comprising a bit pattern encoding data from an assay of the invention in a file format suitable for retrieval and processing in a computerized sequence analysis, comparison, or relative quantitation method.

[0123] The invention also provides a network, comprising a plurality of computing devices linked via a data link, such as an Ethernet cable (coax or 1 OBaseT), telephone line, ISDN line, wireless network, optical fiber, or other suitable signal transmission medium, whereby at least one network device (e.g., computer, disk array, etc.) comprises a pattern of magnetic domains (e.g., magnetic disk) and/or charge domains (e.g., an array of DRAM cells) composing a bit pattern encoding data acquired from an assay of the invention.

[0124] The invention also provides a method for transmitting assay data that includes generating an electronic signal on an electronic communications device, such as a modem, ISDN terminal adapter, DSL, cable modem, ATM switch, or the like, wherein the signal includes (in native or encrypted format) a bit pattern encoding data from an assay or a database comprising a plurality of assay results obtained by the method of the invention.

[0125] In a preferred embodiment, the invention provides a computer system for comparing a query target to a database containing an array of data structures, such as an assay result obtained by the method of the invention, and ranking database targets based on the degree of identity and gap weight to the target data. A central processor is preferably initialized to load and execute the computer program for alignment and/or comparison of the assay results. Data for a query target is entered into the central processor via an I/O device. Execution of the computer program results in the central processor retrieving the assay data from the data file, which comprises a binary description of an assay result.

[0126] The target data or record and the computer program can be transferred to secondary memory, which is typically random access memory (e.g., DRAM, SRAM, SGRAM, or SDRAM). Targets are ranked according to the degree of correspondence between a selected assay characteristic (e.g., binding to a selected affinity moiety) and the same characteristic of the query target and results are output via an I/O device. For example, a central processor can be a conventional computer (e.g., Intel Pentium, PowerPC, Alpha, PA-8000, SPARC, MIPS 4400, MIPS 10000, VAX, etc.); a program can be a commercial or public domain molecular biology software package (e.g., UWGCG Sequence Analysis Software, Darwin); a data file can be an optical or magnetic disk, a data server, a memory device (e.g., DRAM, SRAM, SGRAM, SDRAM, EPROM, bubble memory, flash memory, etc.); an I/O device can be a terminal comprising a video display and a keyboard, a modem, an ISDN terminal adapter, an Ethernet port, a punched card reader, a magnetic strip reader, or other suitable I/O device.

[0127] The invention also preferably provides the use of a computer system, such as that described above, which comprises: (1) a computer; (2) a stored bit pattern encoding a collection of peptide sequence specificity records obtained by the methods of the invention, which may be stored in the computer; (3) a comparison target, such as a query target; and (4) a program for alignment and comparison, typically with rank-ordering of comparison results on the basis of computed similarity values.

[0128] Characteristics of Bladder Cancer-Associated Proteins

[0129] Bladder cancer proteins of the present invention may be classified as secreted proteins, transmembrane proteins or intracellular proteins. In one embodiment, the bladder cancer protein is an intracellular protein. Intracellular proteins may be found in the cytoplasm and/or in the nucleus. Intracellular proteins are involved in all aspects of cellular function and replication (including, e.g., signaling pathways); aberrant expression of such proteins often results in unregulated or disregulated cellular processes (see, e.g., Alberts, et al. (1994) Molecular Biology of the Cell (3d ed.) Garland. For example, many intracellular proteins have enzymatic activity such as protein kinase activity, protein phosphatase activity, protease activity, nucleotide cyclase activity, polymerase activity and the like. Intracellular proteins also serve as docking proteins that are involved in organizing complexes of proteins, or targeting proteins to various subcellular localizations, and are involved in maintaining the structural integrity of organelles.

[0130] An increasingly appreciated concept in characterizing proteins is the presence in the proteins of one or more structural motifs for which defined functions have been attributed. In addition to the highly conserved sequences found in the enzymatic domain of proteins, highly conserved sequences have been identified in proteins that are involved in protein-protein interaction. For example, Src-homology-2 (SH2) domains bind tyrosine-phosphorylated targets in a sequence dependent manner. PTB domains, which are distinct from SH2 domains, also bind tyrosine phosphorylated targets. SH3 domains bind to proline-rich targets. In addition, PH domains, tetratricopeptide repeats and WD domains to name only a few, have been shown to mediate protein-protein interactions. Some of these may also be involved in binding to phospholipids or other second messengers. As will be appreciated by one of ordinary skill in the art, these motifs can be identified on the basis of amino acid sequence; thus, an analysis of the sequence of proteins may provide insight into both the enzymatic potential of the molecule and/or molecules with which the protein may associate. One useful database is Pfam (protein families), which is a large collection of multiple sequence alignments and hidden Markov models covering many common protein domains. Versions are available via the internet from Washington University in St. Louis, the Sanger Center in England, and the Karolinska Institute in Sweden. See, e.g., Bateman, et al. (2000) Nuc. Acids Res. 28:263-266; Sonnhammer, et al. (1997) Proteins 28:405-420; Bateman, et al. (1999) Nuc. Acids Res. 27:260-262; and Sonnhammer, et al. (1998) Nuc. Acids Res. 26:320-322.

[0131] In another embodiment, the bladder cancer sequences are transmembrane proteins. Transmembrane proteins are molecules that span a phospholipid bilayer of a cell. They may have an intracellular domain, an extracellular domain, or both. The intracellular domains of such proteins may have a number of functions including those already described for intracellular proteins. For example, the intracellular domain may have enzymatic activity and/or may serve as a binding site for additional proteins. Frequently the intracellular domain of transmembrane proteins serves both roles. For example certain receptor tyrosine kinases have both protein kinase activity and SH2 domains. In addition, autophosphorylation of tyrosines on the receptor molecule itself, creates binding sites for additional SH2 domain containing proteins.

[0132] Transmembrane proteins may contain from one to many transmembrane domains. For example, receptor tyrosine kinases, certain cytokine receptors, receptor guanylyl cyclases and receptor serine/threonine protein kinases contain a single transmembrane domain. However, various other proteins including channels and adenylyl cyclases contain numerous transmembrane domains. Many important cell surface receptors such as G protein coupled receptors (GPCRs) are classified as “seven transmembrane domain” proteins, as they contain 7 membrane spanning regions. Characteristics of transmembrane domains include approximately 17 consecutive hydrophobic amino acids that may be followed by charged amino acids. Therefore, upon analysis of the amino acid sequence of a particular protein, the localization and number of transmembrane domains within the protein may be predicted (see, e.g., PSORT web site http://psort.nibb.acjp/). Important transmembrane protein receptors include, but are not limited to the insulin receptor, insulin-like growth factor receptor, human growth hormone receptor, glucose transporters, transferrin receptor, epidermal growth factor receptor, low density lipoprotein receptor, epidermal growth factor receptor, leptin receptor, and interleukin receptors, e.g., IL-1 receptor, IL-2 receptor, etc.

[0133] The extracellular domains of transmembrane proteins are diverse; however, conserved motifs are found repeatedly among various extracellular domains. Conserved structure and/or functions have been ascribed to different extracellular motifs. Many extracellular domains are involved in binding to other molecules. In one aspect, extracellular domains are found on receptors. Factors that bind the receptor domain include circulating ligands, which may be peptides, proteins, or small molecules such as adenosine and the like. For example, growth factors such as EGF, FGF, and PDGF are circulating growth factors that bind to their cognate receptors to initiate a variety of cellular responses. Other factors include cytokines, mitogenic factors, neurotrophic factors and the like. Extracellular domains also bind to cell-associated molecules. In this respect, they mediate cell-cell interactions. Cell-associated ligands can be tethered to the cell, e.g., via a glycosylphosphatidylinositol (GPI) anchor, or may themselves be transmembrane proteins. Extracellular domains also associate with the extracellular matrix and contribute to the maintenance of the cell structure.

[0134] Bladder cancer proteins that are transmembrane are particularly preferred in the present invention as they are readily accessible targets for immunotherapeutics, as are described herein. In addition, as outlined below, transmembrane proteins can be also useful in imaging modalities. Antibodies may be used to label such readily accessible proteins in situ. Alternatively, antibodies can also label intracellular proteins, in which case samples are typically permeablized to provide access to intracellular proteins.

[0135] It will also be appreciated by those in the art that a transmembrane protein can be made soluble by removing transmembrane sequences, e.g., through recombinant methods. Furthermore, transmembrane proteins that have been made soluble can be made to be secreted through recombinant means by adding an appropriate signal sequence.

[0136] In another embodiment, the bladder cancer proteins are secreted proteins; the secretion of which can be either constitutive or regulated. These proteins may have a signal peptide or signal sequence that targets the molecule to the secretory pathway. Secreted proteins are involved in numerous physiological events; e.g., if circulating, they often serve to transmit signals to various other cell types. The secreted protein may function in an autocrine manner (acting on the cell that secreted the factor), a paracrine manner (acting on cells in close proximity to the cell that secreted the factor), an endocrine manner (acting on cells at a distance, e.g, secretion into the blood stream), or exocrine (secretion, e.g., through a duct or to adjacent epithelial surface as sweat glands, sebaceous glands, pancreatic ducts, lacrimal glands, mammary glands, wax producing glands of the ear, etc.). Thus secreted molecules often find use in modulating or altering numerous aspects of physiology. Bladder cancer proteins that are secreted or released proteins are particularly preferred in the present invention as they serve as good targets for diagnostic markers, e.g., for blood, plasma, serum, or urine tests. Those which are enzymes may be antibody or small molecule targets. Others may be useful as vaccine targets, e.g., via CTL mechanisms.

[0137] Use of Bladder Cancer Nucleic Acids

[0138] As described above, bladder cancer sequence is initially identified by substantial nucleic acid and/or amino acid sequence homology or linkage to the bladder cancer sequences outlined herein. Such homology can be based upon the overall nucleic acid or amino acid sequence, and is generally determined as outlined below, using either homology programs or hybridization conditions. Typically, linked sequences on a mRNA are found on the same molecule.

[0139] The bladder cancer nucleic acid sequences of the invention, e.g., the sequences in Tables 1A-13, can be fragments of larger genes, e.g., they are nucleic acid segments. “Genes” in this context includes coding regions, non-coding regions, and mixtures of coding and non-coding regions. Accordingly, as will be appreciated by those in the art, using the sequences provided herein, extended sequences, in either direction, of the bladder cancer genes can be obtained, using techniques well known in the art for cloning either longer sequences or the full length sequences; see Ausubel, et al., supra. Much can be done by informatics and many sequences can be clustered to include multiple sequences corresponding to a single gene, e.g., systems such as UniGene (see, http://www.ncbi.nlm.nih.gov/UniGene/).

[0140] Once a bladder cancer nucleic acid is identified, it can be cloned and, if necessary, its constituent parts recombined to form the entire bladder cancer nucleic acid coding regions or the entire mRNA sequence. Once isolated from its natural source, e.g., contained within a plasmid or other vector or excised therefrom as a linear nucleic acid segment, the recombinant bladder cancer nucleic acid can be further-used as a probe to identify and isolate other bladder cancer nucleic acids, e.g., extended coding regions. It can also be used as a “precursor” nucleic acid to make modified or variant bladder cancer nucleic acids and proteins.

[0141] The bladder cancer nucleic acids of the present invention are used in several ways. In a first embodiment, nucleic acid probes to the bladder cancer nucleic acids are made and attached to biochips to be used in screening and diagnostic methods, as outlined below, or for administration, e.g., for gene therapy, vaccine, and/or antisense/inhibition applications. Alternatively, the bladder cancer nucleic acids that include coding regions of bladder cancer proteins can be put into expression vectors for the expression of bladder cancer proteins, again for screening purposes or for administration to a patient.

[0142] In a preferred embodiment, nucleic acid probes to bladder cancer nucleic acids (both the nucleic acid sequences outlined in the tables and/or the complements thereof) are made. The nucleic acid probes attached to the biochip are designed to be substantially complementary to the bladder cancer nucleic acids, e.g., the target sequence (either the target sequence of the sample or to other probe sequences, e.g., in sandwich assays), such that hybridization of the target sequence and the probes of the present invention occurs. As outlined below, this complementarity need not be perfect; there may be a number of base pair mismatches which will interfere with hybridization between the target sequence and the single stranded nucleic acids of the present invention. However, if the number of mutations is so great that no hybridization can occur under even the least stringent of hybridization conditions, the sequence is not a complementary target sequence. Thus, by “substantially complementary” herein is meant that the probes are sufficiently complementary to the target sequences to hybridize under normal reaction conditions, particularly high stringency conditions, as outlined herein.

[0143] A nucleic acid probe is generally single stranded but can be partially single and partially double stranded. The strandedness of the probe is dictated by the structure, composition, and properties of the target sequence. In general, the nucleic acid probes range from about 8 to about 100 bases long, with from about 10 to about 80 bases being preferred, and from about 30 to about 50 bases being particularly preferred. That is, generally whole genes are not used. In some embodiments, much longer nucleic acids can be used, up to hundreds of bases.

[0144] In a preferred embodiment, more than one probe per sequence is used, with either overlapping probes or probes to different sections of the target being used. That is, two, three, four or more probes, with three being preferred, are used to build in a redundancy for a particular target. The probes can be overlapping (e.g., have some sequence in common), or separate. In some cases, PCR primers may be used to amplify signal for higher sensitivity.

[0145] As will be appreciated by those in the art, nucleic acids can be attached or immobilized to a solid support in a wide variety of ways. By “immobilized” and grammatical equivalents herein is meant the association or binding between the nucleic acid probe and the solid support is sufficient to be stable under the conditions of binding, washing, analysis, and removal as outlined below. The binding can typically be covalent or non-covalent. By “non-covalent binding” and grammatical equivalents herein is meant one or more of electrostatic, hydrophilic, and hydrophobic interactions. Included in non-covalent binding is the covalent attachment of a molecule, such as, streptavidin to the support and the non-covalent binding of the biotinylated probe to the streptavidin. By “covalent binding” and grammatical equivalents herein is meant that the two moieties, the solid support and the probe, are attached by at least one bond, including sigma bonds, pi bonds and coordination bonds. Covalent bonds can be formed directly between the probe and the solid support or can be formed by a cross linker or by inclusion of a specific reactive group on either the solid support or the probe or both molecules. Immobilization may also involve a combination of covalent and non-covalent interactions.

[0146] In general, the probes are attached to the biochip in a wide variety of ways, as will be appreciated by those in the art. As described herein, the nucleic acids can either be synthesized first, with subsequent attachment to the biochip, or can be directly synthesized on the biochip.

[0147] The biochip comprises a suitable solid substrate. By “substrate” or “solid support” or other grammatical equivalents herein is meant a material that can be modified to contain discrete individual sites appropriate for the attachment or association of the nucleic acid probes and is amenable to at least one detection method. As will be appreciated by those in the art, the number of possible substrates are very large, and include, but are not limited to, glass and modified or functionalized glass, plastics (including acrylics, polystyrene and copolymers of styrene and other materials, polypropylene, polyethylene, polybutylene, polyurethanes, TeflonJ, etc.), polysaccharides, nylon or nitrocellulose, resins, silica or silica-based materials including silicon and modified silicon, carbon, metals, inorganic glasses, plastics, etc. In general, the substrates allow optical detection and do not appreciably fluoresce. See WO 00/55627.

[0148] Generally the substrate is planar, although as will be appreciated by those in the art, other configurations of substrates may be used as well. For example, the probes may be placed on the inside surface of a tube, for flow-through sample analysis to minimize sample volume. Similarly, the substrate may be flexible, such as a flexible foam, including closed cell foams made of particular plastics.

[0149] In a preferred embodiment, the surface of the biochip and the probe may be derivatized with chemical functional groups for subsequent attachment of the two. Thus, e.g., the biochip is derivatized with a chemical functional group including, but not limited to, amino groups, carboxy groups, oxo groups and thiol groups, with amino groups being particularly preferred. Using these functional groups, the probes can be attached using functional groups on the probes. For example, nucleic acids containing amino groups can be attached to surfaces comprising amino groups, e.g., using linkers as are known in the art; e.g., homo-or hetero-bifunctional linkers as are well known (see 1994 Pierce Chemical Company catalog, technical section on cross-linkers, pages 155-200). In addition, in some cases, additional linkers, such as alkyl groups (including substituted and heteroalkyl groups) may be used.

[0150] In this embodiment, oligonucleotides are synthesized as is known in the art, and then attached to the surface of the solid support. As will be appreciated by those skilled in the art, either the 5′ or 3′ terminus may be attached to the solid support, or attachment may be via an internal nucleoside.

[0151] In another embodiment, the immobilization to the solid support may be very strong, yet non-covalent. For example, biotinylated oligonucleotides can be made, which bind to surfaces covalently coated with streptavidin, resulting in attachment.

[0152] Alternatively, the oligonucleotides may be synthesized on the surface, as is known in the art. For example, photoactivation techniques utilizing photopolymerization compounds and techniques are used. In a preferred embodiment, the nucleic acids can be synthesized in situ, using well known photolithographic techniques, such as those described in WO 95/25116; WO 95/35505; U.S. Pat. Nos. 5,700,637 and 5,445,934; and references cited within, all of which are expressly incorporated by reference; these methods of attachment form the basis of the Affimetrix GeneChip™ technology.

[0153] Often, amplification-based assays are performed to measure the expression level of bladder cancer-associated sequences. These assays are typically performed in conjunction with reverse transcription. In such assays, a bladder cancer-associated nucleic acid sequence acts as a template in an amplification reaction (e.g., Polymerase Chain Reaction, or PCR). In a quantitative amplification, the amount of amplification product will be proportional to the amount of template in the original sample. Comparison to appropriate controls provides a measure of the amount of bladder cancer-associated RNA. Methods of quantitative amplification are well known to those of skill in the art. Detailed protocols for quantitative PCR are provided, e.g., in Innis, et al. (1990) PCR Protocols: A Guide to Methods and Applications Academic Press.

[0154] In some embodiments, a TaqMan based assay is used to measure expression. TaqMan based assays use a fluorogenic oligonucleotide probe that contains a 5′ fluorescent dye and a 3′ quenching agent. The probe hybridizes to a PCR product, but cannot itself be extended due to a blocking agent at the 3′ end. When the PCR product is amplified in subsequent cycles, the 5′ nuclease activity of the polymerase, e.g., AmpliTaq, results in the cleavage of the TaqMan probe. This cleavage separates the 5′ fluorescent dye and the 3′ quenching agent, thereby resulting in an increase in fluorescence as a function of amplification. See, e.g., literature provided by Perkin-Elmer, e.g., www2.perkin-elmer.com.

[0155] Other suitable amplification methods include, but are not limited to, ligase chain reaction (LCR) (see Wu and Wallace (1989) Genomics 4:560-569; Landegren, et al. (1988) Science 241:1077-1080; and Barringer, et al. (1990) Gene 89:117-122), transcription amplification (Kwoh, et al. (1989) Proc. Nat'l Acad. Sci. USA 86:1173-1177), self-sustained sequence replication (Guatelli, et al. (1990) Proc. Nat'l Acad. Sci. USA 87:1874-1878), dot PCR, and linker adapter PCR, etc.

[0156] Expression of Bladder Cancer Proteins from Nucleic Acids

[0157] In a preferred embodiment, bladder cancer nucleic acids, e.g., encoding bladder cancer proteins, are used to make a variety of expression vectors to express bladder cancer proteins which can then be used in screening assays, as described below. Expression vectors and recombinant DNA technology are well known to those of skill in the art (see, e.g., Ausubel, supra, and Fernandez and Hoeffler (eds. 1999) Gene Expression Systems Academic Press) and are used to express proteins. The expression vectors may be either self-replicating extrachromosomal vectors or vectors which integrate into a host genome. Generally, these expression vectors include transcriptional and translational regulatory nucleic acid operably linked to the nucleic acid encoding the bladder cancer protein. The term “control sequences” refers to DNA sequences used for the expression of an operably linked coding sequence in a particular host organism. Control sequences that are suitable for prokaryotes, e.g., include a promoter, optionally an operator sequence, and a ribosome binding site. Eukaryotic cells are known to utilize promoters, polyadenylation signals, and enhancers.

[0158] Nucleic acid is “operably linked” when it is placed into a functional relationship with another nucleic acid sequence. For example, DNA for a presequence or secretory leader is operably linked to DNA for a polypeptide if it is expressed as a preprotein that participates in the secretion of the polypeptide; a promoter or enhancer is operably linked to a coding sequence if it affects the transcription of the sequence; a ribosome binding site is operably linked to a coding sequence if it is positioned so as to facilitate translation; two sequences may be operably linked if they are physically linked on a single polynucleotide. Generally, “operably linked” means that the DNA sequences being linked are contiguous, and, in the case of a secretory leader, contiguous and in reading phase. However, enhancers do not have to be contiguous. Linking is typically accomplished by ligation at convenient restriction sites. If such sites do not exist, synthetic oligonucleotide adaptors or linkers are used in accordance with conventional practice. Transcriptional and translational regulatory nucleic acid will generally be appropriate to the host cell used to express the bladder cancer protein. Numerous types of appropriate expression vectors, and suitable regulatory sequences are known in the art for a variety of host cells.

[0159] In general, transcriptional and translational regulatory sequences may include, but are not limited to, promoter sequences, ribosomal binding sites, transcriptional start and stop sequences, translational start and stop sequences, and enhancer or activator sequences. In a preferred embodiment, the regulatory sequences include a promoter and transcriptional start and stop sequences.

[0160] Promoter sequences encode either constitutive or inducible promoters. The promoters may be either naturally occurring promoters or hybrid promoters. Hybrid promoters, which combine elements of more than one promoter, are useful in the present invention.

[0161] In addition, an expression vector may comprise additional elements. The expression vector may have two replication systems, thus allowing it to be maintained in two organisms, e.g., in mammalian or insect cells for expression and in a procaryotic host for cloning and replication. For integrating expression vectors, the expression vector may contain at least one sequence homologous to the host cell genome, and preferably two homologous sequences which flank the expression construct. The integrating vector may be directed to a specific locus in the host cell by selecting the appropriate homologous sequence for inclusion in the vector. Constructs for integrating vectors are well known (e.g., Fernandez and Hoeffler, supra).

[0162] In addition, in a preferred embodiment, the expression vector contains a selectable marker gene to allow the selection of transformed host cells. Selection genes are well known in the art and will vary with the host cell used.

[0163] The bladder cancer proteins of the present invention may be produced by culturing a host cell transformed with an expression vector under the appropriate conditions to induce or cause expression of the bladder cancer protein. Conditions appropriate for bladder cancer protein expression will vary with the choice of the expression vector and the host cell, and will be easily ascertained by one skilled in the art through routine experimentation or optimization. For example, the use of constitutive promoters in the expression vector will typically require optimizing the growth and proliferation of the host cell, while the use of an inducible promoter typically requires identifying the appropriate growth conditions for induction. In addition, in some embodiments, the timing of the harvest is important. For example, the baculoviral systems used in insect cell expression are lytic viruses, and harvest time selection can be crucial for product yield.

[0164] Appropriate host cells include yeast, bacteria, archaebacteria, fungi, insect, and animal cells, including mammalian cells. Of particular interest are Saccharomyces cerevisiae and other yeasts, E. coli, Bacillus subtilis, Sf9 cells, C129 cells, 293 cells, Neurospora, BHK, CHO, COS, HeLa cells, HUVEC (human umbilical vein endothelial cells), THPI cells (a macrophage cell line) and various other human cells and cell lines.

[0165] In a preferred embodiment, the bladder cancer proteins are expressed in mammalian cells. Mammalian expression systems include retroviral and adenoviral systems. Retroviral vector systems are described in PCT/US97/01019 and PCT/US97/01048. Of particular use are promoters from mammalian viral genes, since viral genes are often highly expressed and have a broad host range. Examples include the SV40 early promoter, mouse mammary tumor virus LTR promoter, adenovirus major late promoter, herpes simplex virus promoter, and the CMV promoter (see, e.g., Fernandez and Hoeffler, supra). Typically, transcription termination and polyadenylation sequences recognized by mammalian cells are regulatory regions located 3′to the translation stop codon and thus, together with the promoter elements, flank the coding sequence. Examples of transcription terminator and polyadenlyation signals include those derived from SV40.

[0166] Methods of introducing exogenous nucleic acid into mammalian and other hosts are well known, and will vary with the host cell used. Techniques include dextran-mediated transfection, calcium phosphate precipitation, polybrene mediated transfection, protoplast fusion, electroporation, viral infection, encapsulation of the polynucleotide(s) in liposomes, and direct microinjection of the DNA into nuclei.

[0167] In another embodiment, bladder cancer proteins are expressed in bacterial systems. Promoters from bacteriophage may also be used. Synthetic promoters and hybrid promoters are also useful; e.g., the tac promoter is a hybrid of the trp and lac promoter sequences. A bacterial promoter can include naturally occurring promoters of non-bacterial origin that have the ability to bind bacterial RNA polymerase and initiate transcription. Often an efficient ribosome binding site is desirable. The expression vector may include a signal peptide sequence that provides for secretion of the bladder cancer protein. The protein is either secreted into the growth media (gram-positive bacteria) or into the periplasmic space, located between the inner and outer membrane of the cell (gram-negative bacteria). The bacterial expression vector may include a selectable marker gene to allow for the selection of bacterial strains that have been transformed. Suitable selection genes include genes which render the bacteria resistant to drugs, e.g., ampicillin, chloramphenicol, erythromycin, kanamycin, neomycin, and tetracycline, or biosynthetic genes, e.g., those in the histidine, tryptophan, and leucine biosynthetic pathways. These components are assembled into expression vectors. Expression vectors for bacteria include vectors for Bacillus subtilis, E. coli, Streptococcus cremoris, and Streptococcus lividans, among others (e.g., Fernandez and Hoeffler, supra). The bacterial expression vectors are transformed into bacterial host cells using, e.g., calcium chloride treatment, electroporation, and other methods.

[0168] Bladder cancer proteins can also be produced in insect cells. See, e.g., Miller, et al. (1997) Baculovirus Expression Vectors: A Laboratory Manual Oxford Books; ISBN: 0716770172; and Makrides (1999) Prot. Expr. Purif. 17:183-202.

[0169] Bladder cancer protein may be produced in yeast cells. Yeast expression systems exist with expression vectors for Saccharomyces cerevisiae, Candida albicans and C. maltosa, Hansenula polymorpha, Kluyveromyces fragilis and K. lactis, Pichia guillerimondii and P. pastoris, Schizosaccharomyces pombe, and Yarrowia lipolytica. See, e.g., Jones, et al. (eds. 1993) The Molecular and Cellular Biology of the Yeast Saccharomyces: Gene Expression CSH Press; ISBN: 0879693657.

[0170] The bladder cancer protein may also be made as a fusion protein, using techniques well known in the art. Thus, e.g., for the creation of monoclonal antibodies, if the desired epitope is small, the bladder cancer protein may be fused to a carrier protein to form an immunogen. Alternatively, the bladder cancer protein may be made as a fusion protein to increase expression, or for other reasons. For example, when the bladder cancer protein is a bladder cancer peptide, the nucleic acid encoding the peptide may be linked to other nucleic acid for expression or purification purposes.

[0171] The bladder cancer protein is typically purified or isolated after expression. Bladder cancer proteins may be isolated or purified in a variety of ways, depending on what other components are present in the sample. Standard purification methods include electrophoretic, molecular, immunological, and chromatographic techniques, including ion exchange, hydrophobic, affinity, reverse-phase HPLC chromatography, and chromatofocusing. The bladder cancer protein may be purified using a standard anti-bladder cancer protein antibody affinity column. Ultrafiltration and diafiltration techniques, in conjunction with protein concentration, are also useful. For general guidance in suitable purification techniques, see, e.g., Scopes (1982) Protein Purification Springer-Verlag. The degree of purification necessary will vary depending on the use of the bladder cancer protein. In some instances no purification will be necessary, which may depend on the intended use.

[0172] Once expressed and purified, if necessary, the bladder cancer proteins and nucleic acids are useful in a number of applications. They may be used as immunoselection reagents, as vaccine reagents, as screening agents, etc.

[0173] Variants of Bladder Cancer Proteins

[0174] In one embodiment, the bladder cancer proteins are derivative or variant bladder cancer proteins as compared to the wild-type sequence. That is, as outlined more fully below, the derivative bladder cancer peptide will often contain at least one amino acid substitution, deletion, or insertion, with amino acid substitutions being particularly preferred. The amino acid substitution, insertion, or deletion may occur at most residues within the bladder cancer peptide.

[0175] Certain embodiments of bladder cancer proteins of the present invention are amino acid sequence variants. These variants typically fall into one or more of three classes: substitutional, insertional, or deletional variants. These variants ordinarily are prepared by site specific mutagenesis of nucleotides in the DNA encoding the bladder cancer protein, using cassette or PCR, mutagenesis, or other techniques well known in the art, to produce DNA encoding the variant, and thereafter expressing the DNA in recombinant cell culture as outlined above. However, variant bladder cancer protein fragments having up to about 100-150 residues may be prepared by in vitro synthesis using established techniques. Amino acid sequence variants are often characterized by the predetermined nature of the variation, a feature that sets them apart from naturally occurring allelic or interspecies variation of the bladder cancer protein amino acid sequence. The variants typically exhibit the same qualitative biological activity as the naturally occurring analogue, although variants can also be selected which have modified characteristics as will be more fully outlined below.

[0176] While the site or region for introducing an amino acid sequence variation is often predetermined, the mutation per se need not be predetermined. To optimize the performance of a mutation at a given site, random mutagenesis may be conducted at the target codon or region and the expressed bladder cancer variants screened for the optimal combination of desired activities. Techniques for making substitution mutations at predetermined sites in DNA having a known sequence are well known, e.g., M13 primer mutagenesis and PCR mutagenesis. Screening of the mutants is performed using assays of bladder cancer protein activities.

[0177] Amino acid substitutions are typically of single residues; insertions usually will be on the order of from about 1 to 20 amino acids, although considerably larger insertions may be tolerated. Deletions range from about 1-20 residues, although in some cases deletions may be much larger.

[0178] Substitutions, deletions, insertions, or combinations thereof may be used to arrive at a final derivative. Generally these changes are done on a few amino acids to minimize the alteration of the molecule. However, larger changes may be tolerated in certain circumstances. When small alterations in the characteristics of the bladder cancer protein are desired, substitutions are generally made in accordance with the amino acid substitution relationships provided in the definition section.

[0179] The variants typically exhibit the same qualitative biological activity and elicit the same immune response as the naturally-occurring analog, although variants also are selected to modify the characteristics of the bladder cancer proteins as needed. Alternatively, the variant may be designed such that the biological activity of the bladder cancer protein is altered. For example, glycosylation sites may be altered or removed.

[0180] Substantial changes in function or immunological identity are made by selecting substitutions that are less conservative than those described above. Substitutions may be made which more significantly affect: the structure of the polypeptide backbone in the area of the alteration, e.g., the alpha-helical or beta-sheet structure; the charge or hydrophobicity of the molecule at the target site; or the bulk of the side chain. Substitutions which are expected to produce the greatest changes in the polypeptide's properties are those in which (a) a hydrophilic residue, e.g., serine or threonine is substituted for (or by) a hydrophobic residue, e.g., leucine, isoleucine, phenylalanine, valine, or alanine; (b) a cysteine or proline is substituted for (or by) another residue; (c) a residue having an electropositive side chain, e.g., lysine, arginine, or histidine, is substituted for (or by) an electronegative residue, e.g., glutamic acid or aspartic acid; or (d) a residue having a bulky side chain, e.g., phenylalanine, is substituted for (or by) one not having a side chain, e.g., glycine.

[0181] Covalent modifications of bladder cancer polypeptides are included within the scope of this invention. One type of covalent modification includes reacting targeted amino acid residues of a bladder cancer polypeptide with an organic derivatizing agent that is capable of reacting with selected side chains or the N-or C-terminal residues of a bladder cancer polypeptide. Derivatization with bifunctional agents is useful, e.g., for crosslinking bladder cancer polypeptides to a water-insoluble support matrix or surface for use in the method for purifying anti-bladder cancer polypeptide antibodies or screening assays. Commonly used crosslinking agents include, e.g., 1,1-bis(diazoacetyl)-2-phenylethane, glutaraldehyde, Nhydroxysuccinimide esters, e.g., esters with 4-azidosalicylic acid, homobifunctional imidoesters, including disuccinimidyl esters such as 3,3′-dithiobis(succinimidylpropionate), bifunctional malcimides such as bis-N-malcimido-1,8-octane and agents such as methyl-3-((p-azidophenyl)dithio)propioimidate.

[0182] Other modifications include deamidation of glutaminyl and asparaginyl residues to the corresponding glutamic and aspartic residues, respectively, hydroxylation of proline and lysine, phosphorylation of hydroxyl groups of serine, threonine or tyrosine residues, methylation of the amino groups of the lysine, arginine, and histidine side chains (pp. 79-86, Creighton (1984) Proteins: Structure and Molecular Properties Freeman), acetylation of the N-terminal amine, and amidation of a C-terminal carboxyl group.

[0183] Another type of covalent modification of the bladder cancer polypeptide included within the scope of this invention comprises altering the native glycosylation pattern of the polypeptide. “Altering the native glycosylation pattern” is intended for purposes herein to mean deleting one or more carbohydrate moieties found in native sequence bladder cancer polypeptide, and/or adding one or more glycosylation sites that are not present in the native sequence bladder cancer polypeptide. Glycosylation patterns can be altered in many ways. For example the use of different cell types to express bladder cancer-associated sequences can result in different glycosylation patterns.

[0184] Addition of glycosylation sites to bladder cancer polypeptides may also be accomplished by altering the amino acid sequence thereof. The alteration may be made, e.g., by the addition of, or substitution by, one or more serine or threonine residues to the native sequence bladder cancer polypeptide (for O-linked glycosylation sites). The bladder cancer amino acid sequence may optionally be altered through changes at the DNA level, particularly by mutating the DNA encoding the bladder cancer polypeptide at preselected bases such that codons are generated that will translate into the desired amino acids.

[0185] Another means of increasing the number of carbohydrate moieties on the bladder cancer polypeptide is by chemical or enzymatic coupling of glycosides to the polypeptide. Such methods are described in the art, e.g., in WO 87/05330, and pp. 259-306 in Aplin and Wriston (1981) CRC Crit. Rev. Biochem.

[0186] Removal of carbohydrate moieties present on the bladder cancer polypeptide may be accomplished chemically or enzymatically or by mutational substitution of codons encoding amino acid residues that serve as targets for glycosylation. Chemical deglycosylation techniques are known in the art. See, e.g., Hakimuddin, et al. (1987) Arch. Biochem. Biophys. 259:52-57; and Edge, et al. (1981) Anal. Biochem. 118:131-137. Enzymatic cleavage of carbohydrate moieties on polypeptides can be achieved by the use of a variety of endo-and exo-glycosidases. See, e.g., Thotakura, et al. (1987) Meth. Enzymol. 138:350-359.

[0187] Another type of covalent modification of bladder cancer comprises linking the bladder cancer polypeptide to one of a variety of nonproteinaceous polymers, e.g., polyethylene glycol, polypropylene glycol, or polyoxyalkylenes, in the manner set forth in U.S. Pat. Nos. 4,640,835; 4,496,689; 4,301,144; 4,670,417; 4,791,192; or 4,179,337.

[0188] Bladder cancer polypeptides of the present invention may also be modified to form chimeric molecules comprising a bladder cancer polypeptide fused to a heterologous polypeptide or amino acid sequence. In one embodiment, a chimeric molecule comprises a fusion of a bladder cancer polypeptide with an epitope tag. The epitope tag is generally placed at the amino-or carboxyl-terminus of the bladder cancer polypeptide. The presence of such epitope-tagged forms of a bladder cancer polypeptide can be detected using an antibody against the tag polypeptide. Also, provision of the epitope tag enables the bladder cancer polypeptide to be readily purified by affinity purification using an anti-tag antibody or another type of affinity matrix that binds to the epitope tag. In an alternative embodiment, the chimeric molecule may comprise a fusion of a bladder cancer polypeptide with an immunoglobulin or a particular region of an immunoglobulin. For a bivalent form of the chimeric molecule, such a fusion could be to the Fc region of an IgG molecule.

[0189] Various tag polypeptides and their respective antibodies are well known in the art. Examples include poly-histidine (poly-his) or poly-histidine-glycine (poly-his-gly) tags; HIS6 and metal chelation tags, the flu HA tag polypeptide and its antibody 12CA5 (Field, et al. (1988) Mol. Cell. Biol. 8:2159-2165); the c-myc tag and the 8F9, 3C7, 6E10, G4, B7, and 9E10 antibodies thereto (Evan, et al. (1985) Molecular and Cellular Biology 5:3610-3616); and the Herpes Simplex virus glycoprotein D (gD) tag and its antibody (Paborsky, et al. (1990) Protein Engineering 3:547-553). Other tag polypeptides include the Flag-peptide (Hopp, et al. (1988) BioTechnology 6:1204-1210); the KT3 epitope peptide (Martin, et al. (1992) Science 255:192-194); tubulin epitope peptide (Skinner, et al. (1991) J. Biol. Chem. 266:15163-15166); and the T7 gene 10 protein peptide tag (Lutz-Freyermuth, et al. (1990) Proc. Nat'l Acad. Sci. USA 87:6393-6397).

[0190] Also included are other bladder cancer proteins of the bladder cancer family, and bladder cancer proteins from other organisms, which are cloned and expressed as outlined below. Thus, probe or degenerate polymerase chain reaction (PCR) primer sequences may be used to find other related bladder cancer proteins from humans or other organisms. As will be appreciated by those in the art, particularly useful probe and/or PCR primer sequences include the unique areas of the bladder cancer nucleic acid sequence. Preferred PCR primers are from about 15-35 nucleotides in length, with from about 20-30 being preferred, and may contain inosine as needed. The conditions for the PCR reaction are well known. See, e.g., Innis (1990) PCR Protocols, supra.

[0191] Antibodies to Bladder Cancer Proteins

[0192] In a preferred embodiment, when the bladder cancer protein is to be used to generate antibodies, e.g., for immunotherapy or immunodiagnosis, the bladder cancer protein should share at least one epitope or determinant with the full length protein. By “epitope” or “determinant” herein is typically meant a portion of a protein which will generate and/or bind an antibody or T-cell receptor in the context of MHC. Thus, in most instances, antibodies made to a smaller bladder cancer protein will be able to bind to the full-length protein, particularly linear epitopes. In a preferred embodiment, the epitope is unique; that is, antibodies generated to a unique epitope show little or no cross-reactivity.

[0193] Methods of preparing polyclonal antibodies are known (see, e.g., Coligan, supra; and Harlow and Lane, supra). Polyclonal antibodies can be raised in a mammal, e.g., by one or more injections of an immunizing agent and, if desired, an adjuvant. Typically, the immunizing agent and/or adjuvant will be injected in the mammal by multiple subcutaneous or intraperitoneal injections. The immunizing agent may include a protein encoded by a nucleic acid of the tables or fragment thereof or a fusion protein thereof. It may be useful to conjugate the immunizing agent to a protein known to be immunogenic in the mammal being immunized. Examples of such immunogenic proteins include but are not limited to keyhole limpet hemocyanin, serum albumin, bovine thyroglobulin, and soybean trypsin inhibitor. Examples of adjuvants which may be employed include Freund's complete adjuvant and MPL-TDM adjuvant (monophosphoryl Lipid A, synthetic trehalose dicorynomycolate). The immunization protocol may be selected as appropriate.

[0194] The antibodies may be monoclonal antibodies. Monoclonal antibodies may be prepared using hybridoma methods, such as those described by Kohler and Milstein (1975) Nature 256:495-497. In a hybridoma method, a mouse, hamster, or other appropriate host animal, is typically immunized with an immunizing agent to elicit lymphocytes that produce or are capable of producing antibodies that will specifically bind to the immunizing agent. Alternatively, the lymphocytes may be immunized in vitro. The immunizing agent will typically include a polypeptide encoded by a nucleic acid of Tables 1A-13 or fragment thereof, or a fusion protein thereof. Generally, either peripheral blood lymphocytes (“PBLs”) are used if cells of human origin are desired, or spleen cells or lymph node cells are used if non-human mammalian sources are desired. The lymphocytes are then fused with an immortalized cell line using a suitable fusing agent, such as polyethylene glycol, to form a hybridoma cell (pp. 59-103, Goding (1986) Monoclonal Antibodies: Principles and Practice Academic Press). Immortalized cell lines are usually transformed mammalian cells, particularly myeloma cells of rodent, bovine and human origin. Usually, rat or mouse myeloma cell lines are employed. The hybridoma cells may be cultured in a suitable culture medium that preferably contains one or more substances that inhibit the growth or survival of the unfused, immortalized cells. For example, if the parental cells lack the enzyme hypoxanthine guanine phosphoribosyl transferase (HGPRT or HPRT), the culture medium for the hybridomas typically will include hypoxanthine, aminopterin, and thymidine (“HAT medium”), which substances prevent the growth of HGPRT-deficient cells.

[0195] In one embodiment, the antibodies are bispecific antibodies. Bispecific antibodies are typically monoclonal, preferably human or humanized, antibodies that have binding specificities for at least two different antigens or that have binding specificities for two epitopes on the same antigen. In one embodiment, one of the binding specificities is for a protein encoded by a nucleic acid Tables 1A-13 or a fragment thereof, the other one is for another antigen, and preferably for a cell-surface protein or receptor or receptor subunit, preferably one that is tumor specific. Alternatively, tetramer-type technology may create multivalent reagents.

[0196] In a preferred embodiment, the antibodies to bladder cancer protein are capable of reducing or eliminating a biological function of a bladder cancer protein, as is described below. That is, the addition of anti-bladder cancer protein antibodies (either polyclonal or preferably monoclonal) to bladder cancer tissue (or cells containing bladder cancer) may reduce or eliminate the bladder cancer. Generally, at least about 25% decrease in activity, growth, size, or the like is preferred, with at least about 50% being particularly preferred, and about a 95-100% decrease being especially preferred.

[0197] In a preferred embodiment the antibodies to the bladder cancer proteins are humanized antibodies (e.g., Xenerex Biosciences; Medarex, Inc.; Abgenix, Inc.; Protein Design Labs, Inc.) Humanized forms of non-human (e.g., murine) antibodies are chimeric molecules of immunoglobulins, immunoglobulin chains or fragments thereof (such as Fv, Fab, Fab′, F(ab′)₂ or other antigen-binding subsequences of antibodies) which contain minimal sequence derived from non-human immunoglobulin. Humanized antibodies include human immunoglobulins (recipient antibody) in which residues from a complementary determining region (CDR) of the recipient are replaced by residues from a CDR of a non-human species (donor antibody) such as mouse, rat, or rabbit having the desired specificity, affinity and capacity. In some instances, Fv framework residues of the human immunoglobulin are replaced by corresponding non-human residues. Humanized antibodies may also comprise residues which are found neither in the recipient antibody nor in the imported CDR or framework sequences. In general, a humanized antibody will comprise substantially all of at least one, and typically two, variable domains, in which all or substantially all of the CDR regions correspond to those of a non-human immunoglobulin and all or substantially all of the framework (FR) regions are those of a human immunoglobulin consensus sequence. The humanized antibody optimally also will comprise at least a portion of an immunoglobulin constant region (Fe), typically that of a human immunoglobulin. See Jones, et al. (1986) Nature 321:522-525; Riechmann, et al. (1988) Nature 332:323-329; and Presta (1992) Curr. Op. Struct. Biol. 2:593-596. Humanization can be performed, e.g., following the method of Winter and co-workers (see Jones, et al. (1986) Nature 321:522-525; Riechmann, et al. (1988) Nature 332:323-327; Verhoeyen, et al. (1988) Science 239:1534-1536), by substituting rodent CDRs or CDR sequences for the corresponding sequences of a human antibody. Accordingly, such humanized antibodies are chimeric antibodies (U.S. Pat. No. 4,816,567), wherein substantially less than an intact human variable domain has been substituted by the corresponding sequence from a non-human species.

[0198] Human antibodies can also be produced using various techniques known in the art, including phage display libraries (Hoogenboom and Winter (1991) J. Mol. Biol. 227:381-388; Marks, et al. (1991) J. Mol. Biol. 222:581-597) or of human monoclonal antibodies (e.g., p. 77, Cole, et al. in Reisfeld and Sell (1985) Monoclonal Antibodies and Cancer Therapy Liss; and Boemer, et al. (1991) J. Imnmunol. 147:86-95). Similarly, human antibodies can be made by introducing of human immunoglobulin loci into transgenic animals, e.g., mice in which the endogenous immunoglobulin genes have been partially or completely inactivated. Upon challenge, human antibody production is observed, which closely resembles that seen in humans in all respects, including gene rearrangement, assembly, and antibody repertoire. This approach is described, e.g., in U.S. Pat. Nos. 5,545,807; 5,545,806; 5,569,825; 5,625,126; 5,633,425; 5,661,016, and Marks, et al. (1992) Bio/Technology 10:779-783; Lonberg, et al. (1994) Nature 368:856-859; Morrison (1994) Nature 368:812-13; Neuberger (1996) Nature Biotechnology 14:826 commenting on Fishwild, et al. (1996) Nature Biotechnology 14:845-51; and Lonberg and Huszar (1995) Intern. Rev. Immunol. 13:65-93.

[0199] By immunotherapy is meant treatment of bladder cancer with an antibody raised against bladder cancer proteins. As used herein, immunotherapy can be passive or active. Passive immunotherapy as defined herein is the passive transfer of antibody to a recipient (patient), which may be used to target a label or toxin. Active immunization is the induction of antibody and/or T-cell responses in a recipient (patient). Induction of an immune response is the result of providing the recipient with an antigen to which antibodies are raised. As appreciated by one of ordinary skill in the art, the antigen may be provided by injecting a polypeptide against which antibodies are desired to be raised into a recipient, or contacting the recipient with a nucleic acid capable of expressing the antigen and under conditions for expression of the antigen, leading to an immune response.

[0200] In a preferred embodiment the bladder cancer proteins against which antibodies are raised are secreted proteins as described above. Without being bound by theory, antibodies used for treatment, bind and prevent the secreted protein from binding to its receptor, thereby inactivating the secreted bladder cancer protein.

[0201] In another preferred embodiment, the bladder cancer protein to which antibodies are raised is a transmembrane protein. Without being bound by theory, antibodies used for treatment, bind the extracellular domain of the bladder cancer protein and prevent it from binding to other proteins, such as circulating ligands or cell-associated molecules. The antibody may cause down-regulation of the transmembrane bladder cancer protein. As will be appreciated by one of ordinary skill in the art, the antibody may be a competitive, noncompetitive or uncompetitive inhibitor of protein binding to the extracellular domain of the bladder cancer protein. The antibody is also an antagonist of the bladder cancer protein. Further, the antibody prevents activation of the transmembrane bladder cancer protein. In one aspect, when the antibody prevents the binding of other molecules to the bladder cancer protein, the antibody prevents growth of the cell. The antibody may also be used to target or sensitize the cell to cytotoxic agents, including, but not limited to TNF-α, TNF-β, IL-1, INF-γ and IL-2, or chemotherapeutic agents including 5FU, vinblastine, actinomycin D, cisplatin, methotrexate, and the like. In some instances the antibody belongs to a sub-type that activates serum complement when complexed with the transmembrane protein thereby mediating cytotoxicity or antigen-dependent cytotoxicity (ADCC). Thus, bladder cancer is treated by administering to a patient antibodies directed against the transmembrane bladder cancer protein. Antibody-labeling may activate a co-toxin, localize a toxin payload, or otherwise provide means to locally ablate cells.

[0202] In another preferred embodiment, the antibody is conjugated to an effector moiety. The effector moiety can be a number of molecules, including labelling moieties such as radioactive labels or fluorescent labels, or can be a therapeutic moiety. In one aspect the therapeutic moiety is a smallmolecule that modulates the activity of the bladder cancer protein. In another aspect the therapeutic moiety modulates the activity of molecules associated with or in close proximity to the bladder cancer protein. The therapeutic moiety may inhibit enzymatic activity such as protease or collagenase or protein kinase activity associated with bladder cancer.

[0203] In a preferred embodiment, the therapeutic moiety can also be a cytotoxic agent. In this method, targeting the cytotoxic agent to bladder cancer tissue or cells, results in a reduction in the number of afflicted cells, thereby reducing symptoms associated with bladder cancer. Cytotoxic agents are numerous and varied and include, but are not limited to, cytotoxic drugs or toxins or active fragments of such toxins. Suitable toxins and their corresponding fragments include diphtheria A chain, exotoxin A chain, ricin A chain, abrin A chain, curcin, crotin, phenomycin, enomycin, and the like. Cytotoxic agents also include radiochemicals made by conjugating radioisotopes to antibodies raised against bladder cancer proteins, or binding of a radionuclide to a chelating agent that has been covalently attached to the antibody. Targeting the therapeutic moiety to transmembrane bladder cancer proteins not only serves to increase the local concentration of therapeutic moiety in the bladder cancer afflicted area, but also serves to reduce deleterious side effects that may be associated with the therapeutic moiety.

[0204] In another preferred embodiment, the bladder cancer protein against which the antibodies are raised is an intracellular protein. In this case, the antibody may be conjugated to a protein which facilitates entry into the cell. In one case, the antibody enters the cell by endocytosis. In another embodiment, a nucleic acid encoding the antibody is administered to the individual or cell. Moreover, wherein the bladder cancer protein can be targeted within a cell, e.g., the nucleus, an antibody thereto contains a signal for that target localization, e.g., a nuclear localization signal.

[0205] The bladder cancer antibodies of the invention specifically bind to bladder cancer proteins. By “specifically bind” herein is meant that the antibodies bind to the protein with a K_{d} of at least about 0.1 mM, more usually at least about 1 μM, preferably at least about 0.1 μM or better, and most preferably, 0.01 μM or better. Selectivity of binding is also important.

[0206] Detection of Bladder Cancer Sequence for Diagnostic and Therapeutic Applications

[0207] In one aspect, the RNA expression levels of genes are determined for different cellular states in the bladder cancer phenotype. Expression levels of genes in normal tissue (e.g., not experiencing bladder cancer) and in bladder cancer tissue (and in some cases, for varying severities of bladder cancer that relate to prognosis, as outlined below), or in non-malignant disease, are evaluated to provide expression profiles. An expression profile of a particular cell state or point of development is essentially a “fingerprint” of the state. While two states may have a particular gene similarly expressed, the evaluation of a number of genes simultaneously allows the generation of a gene expression profile that is reflective of the state of the cell. By comparing expression profiles of cells in different states, information regarding which genes are important (including both up- and down-regulation of genes) in each of these states is obtained. Then, diagnosis may be performed or confirmed to determine whether a tissue sample has the gene expression profile of normal or cancerous tissue. This will provide for molecular diagnosis of related conditions.

[0208] “Differential expression,” or grammatical equivalents as used herein, refers to qualitative or quantitative differences in the temporal and/or cellular gene expression patterns within and among cells and tissue. Thus, a differentially expressed gene can qualitatively have its expression altered, including an activation or inactivation, in, e.g., normal versus bladder cancer tissue. Genes may be turned on or turned off in a particular state, relative to another state thus permitting comparison of two or more states. A qualitatively regulated gene will exhibit an expression pattern within a state or cell type which is detectable by standard techniques. Some genes will be expressed in one state or cell type, but not in both. Alternatively, the difference in expression may be quantitative, e.g., in that expression is increased or decreased; e.g., gene expression is either upregulated, resulting in an increased amount of transcript, or downregulated, resulting in a decreased amount of transcript. The degree to which expression differs need only be large enough to quantify via standard characterization techniques as outlined below, such as by use of Affymetrix GeneChip™ expression arrays. See Lockhart (1996) Nature Biotechnology 14:1675-1680. Other techniques include, but are not limited to, quantitative reverse transcriptase PCR, northern analysis and RNase protection. As outlined above, preferably the change in expression (e.g., upregulation or downregulation) is at least about 50%, more preferably at least about 100%, more preferably at least about 150%, more preferably at least about 200%, with from about 300-1000% being especially preferred.

[0209] Evaluation may be at the gene transcript, or the protein level. The amount of gene expression may be monitored using nucleic acid probes to the DNA or RNA equivalent of the gene transcript, and the quantification of gene expression levels, or, alternatively, the final gene product itself (protein) can be monitored, e.g., with antibodies to the bladder cancer protein and standard immunoassays (ELISAs, etc.) or other techniques, including mass spectroscopy assays, 2D gel electrophoresis assays, etc. Proteins corresponding to bladder cancer genes, e.g., those identified as being important in a bladder cancer or disease phenotype, can be evaluated in a bladder cancer diagnostic test.

[0210] In a preferred embodiment, gene expression monitoring is performed simultaneously on a number of genes. Multiple protein expression monitoring can be performed as well. Similarly, these assays may be performed on an individual basis as well.

[0211] In this embodiment, the bladder cancer nucleic acid probes are attached to biochips as outlined herein for the detection and quantification of bladder cancer sequences in a particular cell. The assays are further described below in the example. PCR techniques can be used to provide greater sensitivity.

[0212] In a preferred embodiment nucleic acids encoding the bladder cancer protein are detected. Although DNA or RNA encoding the bladder cancer protein may be detected, of particular interest are methods wherein an mRNA encoding a bladder cancer protein is detected. Probes to detect mRNA can be a nucleotide/deoxynucleotide probe that is complementary to and hybridizes with the mRNA and includes, but is not limited to, oligonucleotides, cDNA or RNA. Probes also should contain a detectable label, as defined herein. In one method the mRNA is detected after immobilizing the nucleic acid to be examined on a solid support such as nylon membranes and hybridizing the probe with the sample. Following washing to remove the non-specifically bound probe, the label is detected. In another method detection of the mRNA is performed in situ. In this method permeabilized cells or tissue samples are contacted with a detectably labeled nucleic acid probe for sufficient time to allow the probe to hybridize with the target mRNA. Following washing to remove the non-specifically bound probe, the label is detected. For example, a digoxygenin labeled riboprobe (RNA probe) that is complementary to the mRNA encoding a bladder cancer protein is detected by binding the digoxygenin with an anti-digoxygenin secondary antibody and developed with nitro blue tetrazolium and 5-bromo-4-chloro-3-indoyl phosphate.

[0213] In a preferred embodiment, various proteins from the three classes of proteins as described herein (secreted, transmembrane or intracellular proteins) are used in diagnostic assays. The bladder cancer proteins, antibodies, nucleic acids, modified proteins and cells containing bladder cancer sequences are used in diagnostic assays. This can be performed on an individual gene or corresponding polypeptide level. In a preferred embodiment, the expression profiles are used, preferably in conjunction with high throughput screening techniques to allow monitoring for expression profile genes and/or corresponding polypeptides.

[0214] As described and defined herein, bladder cancer proteins, including intracellular, transmembrane or secreted proteins, find use as diagnostic or prognostic markers of bladder cancer, or to assist in selecting therpay based on expression profile and archival data. Detection of these proteins in putative bladder cancer tissue allows for detection or diagnosis of bladder cancer. In one embodiment, antibodies are used to detect bladder cancer proteins. A preferred method separates proteins from a sample by electrophoresis on a gel (typically a denaturing and reducing protein gel, but may be another type of gel, including isoelectric focusing gels and the like). Following separation of proteins, the bladder cancer protein is detected, e.g., by immunoblotting with antibodies raised against the bladder cancer protein. Methods of immunoblotting are well known to those of ordinary skill in the art.

[0215] In another preferred method, antibodies to the bladder cancer protein find use in in situ imaging techniques, e.g., in histology (e.g., Asai (ed. 1993) “Antibodies in Cell Biology” Methods in Cell Biology (vol. 37). In this method cells are contacted with from one to many antibodies to the bladder cancer protein(s). Following washing to remove non-specific antibody binding, the presence of the antibody or antibodies is detected. In one embodiment the antibody is detected by incubating with a secondary antibody that contains a detectable label. In another method the primary antibody to the bladder cancer protein(s) contains a detectable label, e.g. an enzyme marker that can act on a substrate. In another preferred embodiment each one of multiple primary antibodies contains a distinct and detectable label. This method finds particular use in simultaneous screening for a plurality of bladder cancer proteins. As will be appreciated by one of ordinary skill in the art, many other histological imaging techniques are also provided by the invention.

[0216] In a preferred embodiment the label is detected in a fluorometer which has the ability to detect and distinguish emissions of different wavelengths. In addition, a fluorescence activated cell sorter (FACS) can be used in the method.

[0217] In another preferred embodiment, antibodies find use in diagnosing bladder cancer from blood, serum, plasma, stool, urine, and other samples. Such samples, therefore, are useful as samples to be probed or tested for the presence of bladder cancer proteins. Antibodies can be used to detect a bladder cancer protein by previously described immunoassay techniques including ELISA, immunoblotting (western blotting), immunoprecipitation, BIACORE technology and the like. Conversely, the presence of antibodies may indicate an immune response against an endogenous bladder cancer protein.

[0218] In a preferred embodiment, in situ hybridization of labeled bladder cancer nucleic acid probes to tissue arrays is done. For example, arrays of tissue samples, including bladder cancer tissue and/or normal tissue, are made. In situ hybridization (see, e.g., Ausubel, supra) is then performed. When comparing the fingerprints between an individual and a standard, the skilled artisan can make a diagnosis, a prognosis, or a prediction based on the findings. It is further understood that the genes which indicate the diagnosis may differ from those which indicate the prognosis and molecular profiling of the condition of the cells may lead to distinctions between responsive or refractory conditions or may be predictive of outcomes.

[0219] In a preferred embodiment, the bladder cancer proteins, antibodies, nucleic acids, modified proteins and cells containing bladder cancer sequences are used in prognosis assays. As above, gene expression profiles can be generated that correlate to bladder cancer, clinical, pathological, or other information, e.g., in terms of long term prognosis. Again, this may be done on either a protein or gene level, with the use of genes being preferred. Single or multiple genes may be useful in various combinations. As above, bladder cancer probes may be attached to biochips for the detection and quantification of bladder cancer sequences in a tissue or patient. The assays proceed as outlined above for diagnosis. PCR methods may provide more sensitive and accurate quantification.

[0220] Assays for Therapeutic Compounds

[0221] In a preferred embodiment members of the proteins, nucleic acids, and antibodies as described herein are used in drug screening assays. The bladder cancer proteins, antibodies, nucleic acids, modified proteins and cells containing bladder cancer sequences are used in drug screening assays or by evaluating the effect of drug candidates on a “gene expression profile” or expression profile of polypeptides. In a preferred embodiment, the expression profiles are used, preferably in conjunction with high throughput screening techniques to allow monitoring for expression profile genes after treatment with a candidate agent. See, e.g., Zlokarnik, et al. (1998) Science 279:84-88; and Heid (1996) Genome Res. 6:986-94.

[0222] In a preferred embodiment, the bladder cancer proteins, antibodies, nucleic acids, modified proteins and cells containing the native or modified bladder cancer proteins are used in screening assays. That is, the present invention provides novel methods for screening for compositions which modulate the bladder cancer phenotype or an identified physiological function of a bladder cancer protein. As above, this can be done on an individual gene level or by evaluating the effect of drug candidates on a “gene expression profile”. In a preferred embodiment, the expression profiles are used, preferably in conjunction with high throughput screening techniques to allow monitoring for expression profile genes after treatment with a candidate agent, see Zlokarnik, supra.

[0223] Having identified the differentially expressed genes herein, a variety of assays may be executed. In a preferred embodiment, assays may be run on an individual gene or protein level. That is, having identified a particular gene as up regulated in bladder cancer, test compounds can be screened for the ability to modulate gene expression or for binding to the bladder cancer protein. “Modulation” thus includes both an increase and a decrease in gene expression. The preferred amount of modulation will depend on the original change of the gene expression in normal versus tissue undergoing bladder cancer, with changes of at least about 10%, preferably about 50%, more preferably about 100-300%, and in some embodiments about 300-1000% or greater. Thus, if a gene exhibits about 4-fold increase in bladder cancer tissue compared to normal tissue, a decrease of about four-fold is often desired; similarly, about 10-fold decrease in bladder cancer tissue compared to normal tissue often provides a target value of about 10-fold increase in expression to be induced by the test compound.

[0224] The amount of gene expression may be monitored using nucleic acid probes and the quantification of gene expression levels, or, alternatively, the gene product itself can be monitored, e.g., through the use of antibodies to the bladder cancer protein and standard immunoassays. Proteomics and separation techniques may also allow quantification of expression.

[0225] In a preferred embodiment, gene expression or protein monitoring of a number of entities, e.g., an expression profile, is monitored simultaneously. Such profiles will typically involve a plurality of those entities described herein.

[0226] In this embodiment, the bladder cancer nucleic acid probes are attached to biochips as outlined herein for the detection and quantification of bladder cancer sequences in a particular cell. Alternatively, PCR may be used. Thus, a series, e.g., of microtiter plate, may be used with dispensed primers in desired wells. A PCR reaction can then be performed and analyzed for each well.

[0227] Expression monitoring can be performed to identify compounds that modify the expression of one or more bladder cancer-associated sequences, e.g., a polynucleotide sequence set out in Tables 1A-13. Generally, in a preferred embodiment, a test modulator is added to the cells prior to analysis. Moreover, screens are also provided to identify agents that modulate bladder cancer, modulate bladder cancer proteins, bind to a bladder cancer protein, or interfere with the binding of a bladder cancer protein and an antibody or other binding partner.

[0228] The term “test compound” or “drug candidate” or “modulator” or grammatical equivalents as used herein describes a molecule, e.g., protein, oligopeptide, small organic molecule, polysaccharide, polynucleotide, etc., to be tested for the capacity to directly or indirectly alter the bladder cancer phenotype or the expression of a bladder cancer sequence, e.g., a nucleic acid or protein sequence. In preferred embodiments, modulators alter expression profiles, or expression profile nucleic acids or proteins provided herein. In one embodiment, the modulator suppresses a bladder cancer phenotype, e.g., to a normal tissue or non-malignant fingerprint. In another embodiment, a modulator induced a bladder cancer phenotype. Generally, a plurality of assay mixtures are run in parallel with different agent concentrations to obtain a differential response to the various concentrations. Typically, one of these concentrations serves as a negative control, e.g., at zero concentration or below the level of detection.

[0229] Drug candidates encompass numerous chemical classes, though typically they are organic molecules, preferably small organic compounds having a molecular weight of more than about 100 and less than about 2,500 daltons. Preferred small molecules are less than about 2000, or less than about 1500 or less than about 1000 or less than about 500 D. Candidate agents comprise functional groups necessary for structural interaction with proteins, particularly hydrogen bonding, and typically include at least an amine, carbonyl, hydroxyl, or carboxyl group, preferably at least two of the functional chemical groups. The candidate agents often comprise cyclical carbon or heterocyclic structures and/or aromatic or polyaromatic structures substituted with one or more of the above functional groups. Candidate agents are also found among biomolecules including peptides, saccharides, fatty acids, steroids, purines, pyrimidines, derivatives, structural analogs or combinations thereof. Particularly preferred are peptides.

[0230] In one aspect, a modulator will neutralize the effect of a bladder cancer protein. By “ineutralize” is meant that activity of a protein is inhibited or blocked and the consequent effect on the cell.

[0231] In certain embodiments, combinatorial libraries of potential modulators will be screened for an ability to bind to a bladder cancer polypeptide or to modulate activity. Conventionally, new chemical entities with useful properties are generated by identifying a chemical compound (called a “lead compound”) with some desirable property or activity, e.g., inhibiting activity, creating variants of the lead compound, and evaluating the property and activity of those variant compounds. Often, high throughput screening (HTS) methods are employed for such an analysis.

[0232] In one preferred embodiment, high throughput screening methods involve providing a library containing a large number of potential therapeutic compounds (candidate compounds). Such “combinatorial chemical libraries” are then screened in one or more assays to identify those library members (particular chemical species or subclasses) that display a desired characteristic activity. The compounds thus identified can serve as conventional “lead compounds” or can themselves be used as potential or actual therapeutics.

[0233] A combinatorial chemical library is a collection of diverse chemical compounds generated by either chemical synthesis or biological synthesis by combining a number of chemical “building blocks” such as reagents. For example, a linear combinatorial chemical library, such as a polypeptide (e.g., mutein) library, is formed by combining a set of chemical building blocks called amino acids in every possible way for a given compound length (e.g., the number of amino acids in a polypeptide compound). Millions of chemical compounds can be synthesized through such combinatorial mixing of chemical building blocks. See, e.g., Gallop, et al. (1994) J. Med. Chem. 37:1233-1251.

[0234] Preparation and screening of combinatorial chemical libraries is well known to those of skill in the art. Such combinatorial chemical libraries include, but are not limited to, peptide libraries (see, e.g., U.S. Pat. No. 5,010,175, Furka (1991) Pept. Prot. Res. 37:487-493, Houghton, et al. (1991) Nature 354:84-88); peptoids (PCT Publication No WO 91/19735); encoded peptides (PCT Publication WO 93/20242); random bio-oligomers (PCT Publication WO 92/00091); benzodiazepines (U.S. Pat. No. 5,288,514); diversomers such as hydantoins, benzodiazepines, and dipeptides (Hobbs, et al. (1993) Proc. Nat'l Acad. Sci. USA 90:6909-6913); vinylogous polypeptides (Hagihara, et al. (1992) J. Amer. Chem. Soc. 114:6568-6570); nonpeptidal peptidomimetics with a Beta-D-Glucose scaffolding (Hirschmann, et al. (1992) J. Amer. Chem. Soc. 114:9217-9218); analogous organic syntheses of small compound libraries (Chen, et al. (1994) J. Amer. Chem. Soc. 116:2661-2662); oligocarbamates (Cho, et al. (1993) Science 261:1303-1305); and/or peptidyl phosphonates (Campbell, et al. (1994) J. Org. Chem. 59:658-xxx). See, generally, Gordon, et al. (1994) J. Med. Chem. 37:1385-1401, nucleic acid libraries (see, e.g., Strategene, Corp.); peptide nucleic acid libraries (see, e.g., U.S. Pat. No. 5,539,083); antibody libraries (see, e.g., Vaughn, et al. (1996) Nature Biotechnology 14:309-314, and PCT/US96/10287); carbohydrate libraries (Liang, et al. (1996) Science 274:1520-1522, and U.S. Pat. No. 5,593,853); and small organic molecule libraries (see, e.g., benzodiazepines, Baum (p. 33, Jan. 18, 1993) C&E News); isoprenoid (U.S. Pat. No. 5,569,588); thiazolidinones and metathiazanones (U.S. Pat. No. 5,549,974); pyrrolidines (U.S. Pat. Nos. 5,525,735 and 5,519,134); morpholino compounds (U.S. Pat. No. 5,506,337); benzodiazepines (U.S. Pat. No. 5,288,514); and the like.

[0235] Devices for the preparation of combinatorial libraries are commercially available. See, e.g., 357 MPS, 390 MPS, Advanced Chem Tech, Louisville Ky.; Symphony, Rainin, Woburn, Mass.; 433A Applied Biosystems, Foster City, Calif.; and 9050 Plus, Millipore, Bedford, Mass.

[0236] A number of well known robotic systems have also been developed for solution phase chemistries. These systems include automated workstations like the automated synthesis apparatus developed by Takeda Chemical Industries, LTD. (Osaka, Japan) and many robotic systems utilizing robotic arms (Zymate II, Zymark Corporation, Hopkinton, Mass.; Orca, Hewlett-Packard, Palo Alto, Calif.), which mimic the manual synthetic operations performed by a chemist. The above devices are suitable for use with the present invention. The nature and implementation of modifications to these devices (if any) so that they can operate as discussed herein will be apparent to persons skilled in the relevant art. In addition, numerous combinatorial libraries are themselves commercially available (see, e.g., ComGenex, Princeton, N.J.; Asinex, Moscow, Ru; Tripos, Inc., St. Louis, Mo.; ChemStar, Ltd, Moscow, RU; 3D Pharmaceuticals, Exton, Pa.; Martek Biosciences, Columbia, Md., etc.).

[0237] The assays to identify modulators are amenable to high throughput screening. Preferred assays thus detect enhancement or inhibition of bladder cancer gene transcription, inhibition or enhancement of polypeptide expression, and inhibition or enhancement of polypeptide activity.

[0238] High throughput assays for the presence, absence, quantification, or other properties of particular nucleic acids or protein products are well known to those of skill in the art. Similarly, binding assays and reporter gene assays are similarly well known. Thus, e.g., U.S. Pat. No. 5,559,410 discloses high throughput screening methods for proteins, U.S. Pat. No. 5,585,639 discloses high throughput screening methods for nucleic acid binding (e.g., in arrays), while U.S. Pat. Nos. 5,576,220 and 5,541,061 disclose high throughput methods of screening for ligand/antibody binding.

[0239] In addition, high throughput screening systems are commercially available (see, e.g., Zymark Corp., Hopkinton, Mass.; Air Technical Industries, Mentor, Ohio; Beckman Instruments, Inc. Fullerton, Calif.; Precision Systems, Inc., Natick, Mass.; etc.). These systems typically automate entire procedures, including all sample and reagent pipetting, liquid dispensing, timed incubations, and final readings of the microplate in detector(s) appropriate for the assay. These configurable systems provide high throughput and rapid start up as well as a high degree of flexibility and customization. The manufacturers of such systems provide detailed protocols for various high throughput systems. Thus, e.g., Zymark Corp. provides technical bulletins describing screening systems for detecting the modulation of gene transcription, ligand binding, and the like.

[0240] In one embodiment, modulators are proteins, often naturally occurring proteins or fragments of naturally occurring proteins. Thus, e.g., cellular extracts containing proteins, or random or directed digests of proteinaceous cellular extracts, may be used. In this way libraries of proteins may be made for screening in the methods of the invention. Particularly preferred in this embodiment are libraries of bacterial, fungal, viral, and mammalian proteins, with the latter being preferred, and human proteins being especially preferred. Particularly useful test compound will be directed to the class of proteins to which the target belongs, e.g., substrates for enzymes or ligands and receptors.

[0241] In a preferred embodiment, modulators are peptides of from about 5-30 amino acids, with from about 5-20 amino acids being preferred, and from about 7-15 being particularly preferred. The peptides may be digests of naturally occurring proteins as is outlined above, random peptides, or “biased” random peptides. By “randomized” or grammatical equivalents herein is meant that each nucleic acid and peptide consists of essentially random nucleotides and amino acids, respectively. Since generally these random peptides (or nucleic acids, discussed below) are chemically synthesized, they may incorporate nucleotide or amino acid substitutions. The synthetic process can be designed to generate randomized proteins or nucleic acids, to allow the formation of all or most of the possible combinations over the length of the sequence, thus forming a library of randomized candidate bioactive proteinaceous agents.

[0242] In one embodiment, the library is fully randomized, with no sequence preferences or constants. In a preferred embodiment, the library is biased. That is, some positions within the sequence are either held constant, or are selected from a limited number of possibilities. For example, in a preferred embodiment, the nucleotides or amino acid residues are randomized within a defined class, e.g., of hydrophobic amino acids, hydrophilic residues, sterically biased (either small or large) residues, towards the creation of nucleic acid binding domains, the creation of cysteines, for cross-linking, prolines for SH-3 domains, serines, threonines, tyrosines or histidines for phosphorylation sites, etc., or to purines, etc.

[0243] Modulators of bladder cancer can also be nucleic acids, as defined above.

[0244] As described above generally for proteins, nucleic acid modulating agents may be naturally occurring nucleic acids, random nucleic acids, or “biased” random nucleic acids. Digests of procaryotic or eucaryotic genomes may be used as is outlined above for proteins.

[0245] In a preferred embodiment, the candidate compounds are organic chemical moieties, a wide variety of which are available in the literature.

[0246] After the candidate agent has been added and the cells allowed to incubate for some period of time, the sample containing a target sequence to be analyzed is added to the biochip. If required, the target sequence is prepared using known techniques. For example, the sample may be treated to lyse the cells, using known lysis buffers, electroporation, etc., with purification and/or amplification such as PCR performed as appropriate. For example, an in vitro transcription with labels covalently attached to the nucleotides is performed. Generally, the nucleic acids are labeled with biotin-FITC or PE, or with cy3 or cy5.

[0247] In a preferred embodiment, the target sequence is labeled with, e.g., a fluorescent, a chemiluminescent, a chemical, or a radioactive signal, to provide a means of detecting the target sequence's specific binding to a probe. The label also can be an enzyme, such as, alkaline phosphatase or horseradish peroxidase, which when provided with an appropriate substrate produces a product that can be detected. Alternatively, the label can be a labeled compound or small molecule, such as an enzyme inhibitor, that binds but is not catalyzed or altered by the enzyme. The label also can be a moiety or compound, such as, an epitope tag or biotin which specifically binds to streptavidin. For the example of biotin, the streptavidin is labeled as described above, thereby, providing a detectable signal for the bound target sequence. Unbound labeled streptavidin is typically removed prior to analysis.

[0248] As will be appreciated by those in the art, these assays can be direct hybridization assays or can comprise “sandwich assays”, which include the use of multiple probes, as is generally outlined in U.S. Pat. Nos. 5,681,702, 5,597,909, 5,545,730, 5,594,117, 5,591,584, 5,571,670, 5,580,731, 5,571,670, 5,591,584, 5,624,802, 5,635,352, 5,594,118, 5,359,100, 5,124,246 and 5,681,697, all of which are hereby incorporated by reference. In this embodiment, in general, the target nucleic acid is prepared as outlined above, and then added to the biochip comprising a plurality of nucleic acid probes, under conditions that allow the formation of a hybridization complex.

[0249] A variety of hybridization conditions may be used in the present invention, including high, moderate and low stringency conditions as outlined above. The assays are generally run under stringency conditions which allows formation of the label probe hybridization complex only in the presence of target. Stringency can be controlled by altering a step parameter that is a thermodynamic variable, including, but not limited to, temperature, formamide concentration, salt concentration, chaotropic salt concentration pH, organic solvent concentration, etc.

[0250] These parameters may also be used to control non-specific binding, as is generally outlined in U.S. Pat. No. 5,681,697. Thus it may be desirable to perform certain steps at higher stringency conditions to reduce non-specific binding.

[0251] The reactions outlined herein may be accomplished in a variety of ways. Components of the reaction may be added simultaneously, or sequentially, in different orders, with preferred embodiments outlined below. In addition, the reaction may include a variety of other reagents. These include salts, buffers, neutral proteins, e.g., albumin, detergents, etc., which may be used to facilitate optimal hybridization and detection, and/or reduce non-specific or background interactions. Reagents that otherwise improve the efficiency of the assay, such as protease inhibitors, nuclease inhibitors, anti-microbial agents, etc., may also be used as appropriate, depending on the sample preparation methods and purity of the target.

[0252] The assay data are analyzed to determine the expression levels, and changes in expression levels as between states, of individual genes, forming a gene expression profile.

[0253] Screens are performed to identify modulators of the bladder cancer phenotype. In one embodiment, screening is performed to identify modulators that can induce or suppress a particular expression profile, thus preferably generating the associated phenotype. In another embodiment, e.g., for diagnostic applications, having identified differentially expressed genes important in a particular state, screens can be performed to identify modulators that alter expression of individual genes. In an another embodiment, screening is performed to identify modulators that alter a biological function of the expression product of a differentially expressed gene. Again, having identified the importance of a gene in a particular state, screens are performed to identify agents that bind and/or modulate the biological activity of the gene product.

[0254] In addition screens can be done for genes that are induced in response to a candidate agent. After identifying a modulator based upon its ability to suppress a bladder cancer expression pattern leading to a normal expression pattern, or to modulate a single bladder cancer gene expression profile so as to mimic the expression of the gene from normal tissue, a screen as described above can be performed to identify genes that are specifically modulated in response to the agent. Comparing expression profiles between normal tissue and agent treated bladder cancer tissue reveals genes that are not expressed in normal tissue or bladder cancer tissue, but are expressed in agent treated tissue. These agent-specific sequences can be identified and used by methods described herein for bladder cancer genes or proteins. In particular these sequences and the proteins they encode find use in marking or identifying agent treated cells. In addition, antibodies can be raised against the agent induced proteins and used to target novel therapeutics to the treated bladder cancer tissue sample.

[0255] Thus, in one embodiment, a test compound is administered to a population of bladder cancer cells, that have an associated bladder cancer expression profile. By “administration” or “contacting” herein is meant that the candidate agent is added to the cells in such a manner as to allow the agent to act upon the cell, whether by uptake and intracellular action, or by action at the cell surface. In some embodiments, nucleic acid encoding a proteinaceous candidate agent (e.g., a peptide) may be put into a viral construct such as an adenoviral or retroviral construct, and added to the cell, such that expression of the peptide agent is accomplished, e.g., PCT US97/01019. Regulatable gene therapy systems can also be used.

[0256] Once the test compound has been administered to the cells, the cells can be washed if desired and are allowed to incubate under preferably physiological conditions for some period of time. The cells are then harvested and a new gene expression profile is generated, as outlined herein.

[0257] Thus, e.g., bladder cancer or non-malignant tissue may be screened for agents that modulate, e.g., induce or suppress the bladder cancer phenotype. A change in at least one gene, preferably many, of the expression profile indicates that the agent has an effect on bladder cancer activity. By defining such a signature for the bladder cancer phenotype, screens for new drugs that alter the phenotype can be devised. With this approach, the drug target need not be known and need not be represented in the original expression screening platform, nor does the level of transcript for the target protein need to change.

[0258] In a preferred embodiment, as outlined above, screens may be done on individual genes and gene products (proteins). That is, having identified a particular differentially expressed gene as important in a particular state, screening of modulators of either the expression of the gene or the gene product itself can be done. The gene products of differentially expressed genes are sometimes referred to herein as “bladder cancer proteins” or a “bladder cancer modulatory protein”. The bladder cancer modulatory protein may be a fragment, or alternatively, be the full length protein to the fragment encoded by the nucleic acids of the Tables 1A-13. Preferably, the bladder cancer modulatory protein is a fragment. In a preferred embodiment, the bladder cancer amino acid sequence which is used to determine sequence identity or similarity is encoded by a nucleic acid of Tables 1A-13. In another embodiment, the sequences are naturally occurring allelic variants of a protein encoded by a nucleic acid of Tables 1A-13. In another embodiment, the sequences are sequence variants as further described herein.

[0259] Preferably, the bladder cancer modulatory protein is a fragment of approximately 14 to 24 amino acids long. More preferably the fragment is a soluble fragment. Preferably, the fragment includes a non-transmembrane region. In a preferred embodiment, the fragment has an N-terminal Cys to aid in solubility. In one embodiment, the C-terminus of the fragment is kept as a free acid and the N-terminus is a free amine to aid in coupling, e.g., to cysteine.

[0260] In one embodiment the bladder cancer proteins are conjugated to an immunogenic agent as discussed herein. In one embodiment the bladder cancer protein is conjugated to BSA.

[0261] Measurements of bladder cancer polypeptide activity, or of bladder cancer or the bladder cancer phenotype can be performed using a variety of assays. For example, the effects of the test compounds upon the function of the bladder cancer polypeptides can be measured by examining parameters described above. A suitable physiological change that affects activity can be used to assess the influence of a test compound on the polypeptides of this invention. When the functional consequences are determined using intact cells or animals, one can also measure a variety of effects such as, in the case of bladder cancer associated with tumors, tumor growth, tumor metastasis, neovascularization, hormone release, transcriptional changes to both known and uncharacterized genetic markers (e.g., northern blots), changes in cell metabolism such as cell growth or pH changes, and changes in intracellular second messengers such as cGMP. In the assays of the invention, mammalian bladder cancer polypeptide is typically used, e.g., mouse, preferably human.

[0262] Assays to identify compounds with modulating activity can be performed in vitro. For example, a bladder cancer polypeptide is first contacted with a potential modulator and incubated for a suitable amount of time, e.g., from 0.5-48 hours. In one embodiment, the bladder cancer polypeptide levels are determined in vitro by measuring the level of protein or mRNA. The level of protein is measured using immunoassays such as western blotting, ELISA and the like with an antibody that selectively binds to the bladder cancer polypeptide or a fragment thereof. For measurement of mRNA, amplification, e.g., using PCR, LCR, or hybridization assays, e.g., northern hybridization, RNase protection, dot blotting, are preferred. The level of protein or mRNA is detected using directly or indirectly labeled detection agents, e.g., fluorescently or radioactively labeled nucleic acids, radioactively or enzymatically labeled antibodies, and the like, as described herein.

[0263] Alternatively, a reporter gene system can be devised using the bladder cancer protein promoter operably linked to a reporter gene such as luciferase, green fluorescent protein, CAT, or β-gal. The reporter construct is typically transfected into a cell. After treatment with a potential modulator, the amount of reporter gene transcription, translation, or activity is measured according to standard techniques known to those of skill in the art.

[0264] In a preferred embodiment, as outlined above, screens may be done on individual genes and gene products (proteins). That is, having identified a particular differentially expressed gene as important in a particular state, screening of modulators of the expression of the gene or the gene product itself can be done. The gene products of differentially expressed genes are sometimes referred to herein as “bladder cancer proteins.” The bladder cancer protein may be a fragment, or alternatively, be the full length protein to a fragment shown herein.

[0265] In one embodiment, screening for modulators of expression of specific genes is performed. Typically, the expression of only one or a few genes are evaluated. In another embodiment, screens are designed to first find compounds that bind to differentially expressed proteins. These compounds are then evaluated for the ability to modulate differentially expressed activity. Moreover, once initial candidate compounds are identified, variants can be further screened to better evaluate structure activity relationships.

[0266] In a preferred embodiment, binding assays are done. In general, purified or isolated gene product is used; that is, the gene products of one or more differentially expressed nucleic acids are made. For example, antibodies are generated to the protein gene products, and standard immunoassays are run to determine the amount of protein present. Alternatively, cells comprising the bladder cancer proteins can be used in the assays.

[0267] Thus, in a preferred embodiment, the methods comprise combining a bladder cancer protein and a candidate compound, and determining the binding of the compound to the bladder cancer protein. Preferred embodiments utilize the human bladder cancer protein, although other mammalian proteins may also be used, e.g., for the development of animal models of human disease. In some embodiments, as outlined herein, variant or derivative bladder cancer proteins may be used.

[0268] Generally, in a preferred embodiment of the methods herein, the bladder cancer protein or the candidate agent is non-diffusably bound to an insoluble support having isolated sample receiving areas (e.g., a microtiter plate, an array, etc.). The insoluble supports may be made of a composition to which the compositions can be bound, is readily separated from soluble material, and is otherwise compatible with the overall method of screening. The surface of such supports may be solid or porous and of a convenient shape. Examples of suitable insoluble supports include microtiter plates, arrays, membranes and beads. These are typically made of glass, plastic (e.g., polystyrene), polysaccharides, nylon or nitrocellulose, teflon™, etc. Microtiter plates and arrays are especially convenient because a large number of assays can be carried out simultaneously, using small amounts of reagents and samples. The particular manner of binding of the composition is not crucial so long as it is compatible with the reagents and overall methods of the invention, maintains the activity of the composition and is nondiffusable. Preferred methods of binding include the use of antibodies (which do not sterically block either the ligand binding site or activation sequence when the protein is bound to the support), direct binding to “sticky” or ionic supports, chemical crosslinking, the synthesis of the protein or agent on the surface, etc. Following binding of the protein or agent, excess unbound material is removed by washing. The sample receiving areas may then be blocked through incubation with bovine serum albumin (BSA), casein or other innocuous protein or other moiety.

[0269] In a preferred embodiment, the bladder cancer protein is bound to the support, and a test compound is added to the assay. Alternatively, the candidate agent is bound to the support and the bladder cancer protein is added. Novel binding agents include specific antibodies, non-natural binding agents identified in screens of chemical libraries, peptide analogs, etc. Of particular interest are screening assays for agents that have a low toxicity for human cells. A wide variety of assays may be used for this purpose, including labeled in vitro protein-protein binding assays, electrophoretic mobility shift assays, immunoassays for protein binding, functional assays (phosphorylation assays, etc.) and the like.

[0270] The determination of the binding of the test modulating compound to the bladder cancer protein may be done in a number of ways. In a preferred embodiment, the compound is labeled, and binding determined directly, e.g., by attaching all or a portion of the bladder cancer protein to a solid support, adding a labeled candidate agent (e.g., a fluorescent label), washing off excess reagent, and determining whether the label is present on the solid support. Various blocking and washing steps may be utilized as appropriate.

[0271] In some embodiments, only one of the components is labeled, e.g., the proteins (or proteinaceous candidate compounds) can be labeled. Alternatively, more than one component can be labeled with different labels, e.g., ¹²⁵I for the proteins and a fluorophor for the compound. Proximity reagents, e.g., quenching or energy transfer reagents are also useful.

[0272] In one embodiment, the binding of the test compound is determined by competitive binding assay. The competitor is a binding moiety known to bind to the target molecule (e.g., a bladder cancer protein), such as an antibody, peptide, binding partner, ligand, etc. Under certain circumstances, there may be competitive binding between the compound and the binding moiety, with the binding moiety displacing the compound. In one embodiment, the test compound is labeled. Either the compound, or the competitor, or both, is added first to the protein for a time sufficient to allow binding, if present. Incubations may be performed at a temperature which facilitates optimal activity, typically between 4 and 40° C. Incubation periods are typically optimized, e.g., to facilitate rapid high throughput screening. Typically between 0.1 and 1 hour will be sufficient. Excess reagent is generally removed or washed away. The second component is then added, and the presence or absence of the labeled component is followed, to indicate binding.

[0273] In a preferred embodiment, the competitor is added first, followed by the test compound. Displacement of the competitor is an indication that the test compound is binding to the bladder cancer protein and thus is capable of binding to, and potentially modulating, the activity of the bladder cancer protein. In this embodiment, either component can be labeled. Thus, e.g., if the competitor is labeled, the presence of label in the wash solution indicates displacement by the agent. Alternatively, if the test compound is labeled, the presence of the label on the support indicates displacement.

[0274] In an alternative embodiment, the test compound is added first, with incubation and washing, followed by the competitor. The absence of binding by the competitor may indicate that the test compound is bound to the bladder cancer protein with a higher affinity. Thus, if the test compound is labeled, the presence of the label on the support, coupled with a lack of competitor binding, may indicate that the test compound is capable of binding to the bladder cancer protein.

[0275] In a preferred embodiment, the methods comprise differential screening to identity agents that are capable of modulating the activity of the bladder cancer proteins. In this embodiment, the methods comprise combining a bladder cancer protein and a competitor in a first sample. A second sample comprises a test compound, a bladder cancer protein, and a competitor. The binding of the competitor is determined for both samples, and a change, or difference in binding between the two samples indicates the presence of an agent capable of binding to the bladder cancer protein and potentially modulating its activity. That is, if the binding of the competitor is different in the second sample relative to the first sample, the agent is capable of binding to the bladder cancer protein.

[0276] Alternatively, differential screening is used to identify drug candidates that bind to the native bladder cancer protein, but cannot bind to modified bladder cancer proteins. The structure of the bladder cancer protein may be modeled, and used in rational drug design to synthesize agents that interact with that site. Drug candidates that affect the activity of a bladder cancer protein are also identified by screening drugs for the ability to either enhance or reduce the activity of the protein.

[0277] Positive controls and negative controls may be used in the assays. Preferably control and test samples are performed in at least triplicate to obtain statistically significant results. Incubation of all samples is for a time sufficient for the binding of the agent to the protein. Following incubation, samples are washed free of non-specifically bound material and the amount of bound, generally labeled agent determined. For example, where a radiolabel is employed, the samples may be counted in a scintillation counter to determine the amount of bound compound.

[0278] A variety of other reagents may be included in the screening assays. These include reagents like salts, neutral proteins, e.g., albumin, detergents, etc. which may be used to facilitate optimal protein-protein binding and/or reduce non-specific or background interactions. Also reagents that otherwise improve the efficiency of the assay, such as protease inhibitors, nuclease inhibitors, anti-microbial agents, etc., may be used. The mixture of components may be added in an order that provides for the requisite binding.

[0279] In a preferred embodiment, the invention provides methods for screening for a compound capable of modulating the activity of a bladder cancer protein. The methods comprise adding a test compound, as defined above, to a cell comprising bladder cancer proteins. Many different cell types may be transfected to contain a recombinant nucleic acid that encodes a bladder cancer protein. In a preferred embodiment, a library of candidate agents are tested on a plurality of cells.

[0280] In one aspect, the assays are evaluated in the presence or absence or previous or subsequent exposure of physiological signals, e.g., hormones, antibodies, peptides, antigens, cytokines, growth factors, action potentials, and pharmacological agents including, e.g., chemotherapeutics, radiation, carcinogenics, or other cells (e.g., cell-cell contacts). In one example, the determinations are determined at different stages of the cell cycle process.

[0281] In this way, compounds that modulate bladder cancer agents are identified. Compounds with pharmacological activity are able to enhance or interfere with the activity of the bladder cancer protein. Once identified, similar structures are evaluated to identify critical structural feature of the compound.

[0282] In one embodiment, a method of inhibiting bladder cancer cell division is provided. The method comprises administration of a bladder cancer inhibitor. In another embodiment, a method of inhibiting bladder cancer is provided. The method comprises administration of a bladder cancer inhibitor. In a further embodiment, methods of treating cells or individuals with bladder cancer are provided. The method comprises administration of a bladder cancer inhibitor. In one embodiment, a bladder cancer inhibitor is an antibody as discussed above. In another embodiment, the bladder cancer inhibitor is an antisense molecule.

[0283] A variety of cell growth, proliferation, and metastasis assays are known to those of skill in the art, as described below.

[0284] Soft Agar Growth or Colony Formation in Suspension

[0285] Normal cells require a solid substrate to attach and grow. When the cells are transformed, they lose this phenotype and grow detached from the substrate. For example, transformed cells can grow in stirred suspension culture or suspended in semi-solid media, such as semi-solid or soft agar. The transformed cells, when transfected with tumor suppressor genes, regenerate normal phenotype and require a solid substrate to attach and grow. Soft agar growth or colony formation in suspension assays can be used to identify modulators of bladder cancer sequences, which when expressed in host cells, inhibit abnormal cellular proliferation and transformation. A therapeutic compound would reduce or eliminate the host cells' ability to grow in stirred suspension culture or suspended in semi-solid media, such as semi-solid or soft.

[0286] Techniques for soft agar growth or colony formation in suspension assays are described in Freshney (1994) Culture of Animal Cells: A Manual of Basic Technique (3d ed.) Wiley-Liss, herein incorporated by reference. See also, the methods section of Garkavtsev, et al. (1996), supra, herein incorporated by reference.

[0287] Contact Inhibition and Density Limitation of Growth

[0288] Normal cells typically grow in a flat and organized pattern in a petri dish until they touch other cells. When the cells touch one another, they are contact inhibited and stop growing. When cells are transformed, however, the cells are not contact inhibited and continue to grow to high densities in disorganized foci. Thus, the transformed cells grow to a higher saturation density than normal cells. This can be detected morphologically by the formation of a disoriented monolayer of cells or rounded cells in foci within the regular pattern of normal surrounding cells. Alternatively, labeling index with (3H)-thymidine at saturation density can be used to measure density limitation of growth. See Freshney (1994), supra. The transformed cells, when transfected with tumor suppressor genes, regenerate a normal phenotype and become contact inhibited and would grow to a lower density.

[0289] In this assay, labeling index with (³H)-thymidine at saturation density is a preferred method of measuring density limitation of growth. Transformed host cells are transfected with a bladder cancer-associated sequence and are grown for 24 hours at saturation density in non-limiting medium conditions. The percentage of cells labeling with (³H)-thymidine is determined autoradiographically. See, Freshney (1994), supra.

[0290] Growth Factor or Serum Dependence

[0291] Transformed cells have a lower serum dependence than their normal counterparts (see, e.g., Temin (1966) J. Nat'l Cancer Inst. 37:167-175; Eagle, et al. (1970) J. Exp. Med. 131:836-879; Freshney (1994), supra). This is in part due to release of various growth factors by the transformed cells. Growth factor or serum dependence of transformed host cells can be compared with that of control.

[0292] Tumor Specific Markers Levels

[0293] Tumor cells release an increased amount of certain factors (hereinafter “tumor specific markers”) than their normal counterparts. For example, plasminogen activator (PA) is released from human glioma at a higher level than from normal brain cells. See, e.g., “Angiogenesis, tumor vascularization, and potential interference with tumor growth” pp. 178-184 in Mihich (ed. 1985) Biological Responses in Cancer Plenum. Similarly, tumor angiogenesis factor (TAF) is released at a higher level in tumor cells than their normal counterparts. See, e.g., Folkman (1992) Sem Cancer Biol. 3:89-96.

[0294] Various techniques which measure the release of these factors are described in Freshney (1994), supra. See also, Unkeless, et al. (1974) J. Biol. Chem. 249:4295-4305; Strickland and Beers (1976) J. Biol. Chem. 251:5694-5702; Whur, et al. (1980) Br. J. Cancer 42:305-312; Gullino “Angiogenesis, tumor vascularization, and potential interference with tumor growth” pp. 178-184 in Mihich (ed. 1985) Biological Responses in Cancer, Plenum; and Freshney (1985) Anticancer Res. 5:111-130.

[0295] Invasiveness into Matrigel

[0296] The degree of invasiveness into Matrigel or some other extracellular matrix constituent can be used as an assay to identify compounds that modulate bladder cancer-associated sequences. Tumor cells exhibit a good correlation between malignancy and invasiveness of cells into Matrigel or some other extracellular matrix constituent. In this assay, tumorigenic cells are typically used as host cells. Expression of a tumor suppressor gene in these host cells would decrease invasiveness of the host cells.

[0297] Techniques described in Freshney (1984), supra, can be used. Briefly, the level of invasion of host cells can be measured by using filters coated with Matrigel or some other extracellular matrix constituent. Penetration into the gel, or through to the distal side of the filter, is rated as invasiveness, and rated histologically by number of cells and distance moved, or by prelabeling the cells with ¹²⁵I and counting the radioactivity on the distal side of the filter or bottom of the dish. See, e.g., Freshney (2000), supra.

[0298] Tumor Growth In Vivo

[0299] Effects of bladder cancer-associated sequences on cell growth can be tested in transgenic or immune-suppressed mice. Knock-out transgenic mice can be made, in which the bladder cancer gene is disrupted or in which a bladder cancer gene is inserted. Knock-out transgenic mice can be made by insertion of a marker gene or other heterologous gene into the endogenous bladder cancer gene site in the mouse genome via homologous recombination. Such mice can also be made by substituting the endogenous bladder cancer gene with a mutated version of the bladder cancer gene, or by mutating the endogenous bladder cancer gene, e.g., by exposure to carcinogens.

[0300] A DNA construct is introduced into the nuclei of embryonic stem cells. Cells containing the newly engineered genetic lesion are injected into a host mouse embryo, which is re-implanted into a recipient female. Some of these embryos develop into chimeric mice that possess germ cells partially derived from the mutant cell line. By breeding the chimeric mice it is possible to obtain a new line of mice containing the introduced genetic lesion. See, e.g., Capecchi, et al. (1989) Science 244:1288-1292. Chimeric targeted mice can be made. See Hogan, et al. (1988) Manipulating the Mouse Embryo: A Laboratory Manual, CSH Press; and Robertson (ed. 1987) Teratocarcinomas and Embryonic Stem Cells: A Practical Approach IRL Press, Washington, D.C.

[0301] Alternatively, various immune-suppressed or immune-deficient host animals can be used. For example, genetically athymic “nude” mouse (see, e.g., Giovanella, et al. (1974) J. Nat'l Cancer Inst. 52:921-930), a SCID mouse, a thymectomized mouse, or an irradiated mouse (see, e.g., Bradley, et al. (1978) Br. J. Cancer 38:263-272; Selby, et al. (1980) Br. J. Cancer 41:52-61) can be used as a host. Transplantable tumor cells (typically about 10⁶ cells) injected into isogenic hosts will produce invasive tumors in a high proportions of cases, while normal cells of similar origin will not. In hosts which developed invasive tumors, cells expressing a bladder cancer-associated sequences are injected subcutaneously. After a suitable length of time, preferably about 4-8 weeks, tumor growth is measured (e.g., by volume or by its two largest dimensions) and compared to the control. Tumors that have statistically significant reduction (using, e.g., Student's T test) are said to have inhibited growth.

[0302] Polynucleotide Modulators of Bladder Cancer

[0303] Antisense and RNAi Polynucleotides

[0304] In certain embodiments, the activity of a bladder cancer-associated protein is down-regulated, or entirely inhibited, by the use of antisense polynucleotide, e.g., a nucleic acid complementary to, and which can preferably hybridize specifically to, a coding mRNA nucleic acid sequence, e.g., a bladder cancer protein mRNA, or a subsequence thereof. Binding of the antisense polynucleotide to the mRNA reduces the translation and/or stability of the mRNA.

[0305] In the context of this invention, antisense polynucleotides can comprise naturally-occurring nucleotides, or synthetic species formed from naturally-occurring subunits or their close homologs. Antisense polynucleotides may also have altered sugar moieties or intersugar linkages. Exemplary among these are the phosphorothioate and other sulfur containing species which are known for use in the art. Analogs are comprehended by this invention so long as they function effectively to hybridize with the bladder cancer protein mRNA. See, e.g., Isis Pharmaceuticals, Carlsbad, Calif.; Sequitor, Inc., Natick, Mass.

[0306] Such antisense polynucleotides can readily be synthesized using recombinant means, or can be synthesized in vitro. Equipment for such synthesis is sold by several vendors, including Applied Biosystems. The preparation of other oligonucleotides such as phosphorothioates and alkylated derivatives is also well known.

[0307] Antisense molecules as used herein include antisense or sense oligonucleotides. Sense oligonucleotides can, e.g., be employed to block transcription by binding to the antisense strand. The antisense and sense oligonucleotide comprise a single-stranded nucleic acid sequence (either RNA or DNA) capable of binding to target mRNA (sense) or DNA (antisense) sequences for bladder cancer molecules. A preferred antisense molecule is for a bladder cancer sequences in Tables 1A-13, or for a ligand or activator thereof. Antisense or sense oligonucleotides, according to the present invention, comprise a fragment generally at least about 14 nucleotides, preferably from about 14 to 30 nucleotides. The ability to derive an antisense or a sense oligonucleotide, based upon a cDNA sequence encoding a given protein is described in, e.g., Stein and Cohen (1988) Cancer Res. 48:2659-2668; and van der Krol, et al. (1988) BioTechniques 6:958-976.

[0308] RNA interference is a mechanism to suppress gene expression in a sequence specific manner. See, e.g., Brumelkamp, et al. (2002) Sciencexpress (Mar. 21, 2002); Sharp (1999) Genes Dev. 13:139-141; and Cathew (2001) Curr. Op. Cell Biol. 13:244-248. In mammalian cells, short, e.g., 21 nt, double stranded small interfering RNAs (siRNA) have been shown to be effective at inducing an RNAi response. See, e.g., Elbashir, et al. (2001) Nature 411:494-498. The mechanism may be used to downregulate expression levels of identified genes, e.g., treatment of or validation of relevance to disease

[0309] Ribozymes

[0310] In addition to antisense polynucleotides, ribozymes can be used to target and inhibit transcription of bladder cancer-associated nucleotide sequences. A ribozyme is an RNA molecule that catalytically cleaves other RNA molecules. Different kinds of ribozymes have been described, including group I ribozymes, hammerhead ribozymes, hairpin ribozymes, RNase P, and axhead ribozymes. See, e.g., Castanotto, et al. (1994) Adv. in Pharmacology 25: 289-317 for a general review of the properties of different ribozymes.

[0311] The general features of hairpin ribozymes are described, e.g., in Hampel, et al. (1990) Nucl. Acids Res. 18:299-304; European Patent Publication No. 0 360 257; U.S. Pat. No. 5,254,678. Methods of preparing them are well known. See, e.g., WO 94/26877; Ojwang, et al. (1993) Proc. Nat'l Acad. Sci. USA 90:6340-6344; Yamada, et al. (1994) Human Gene Therapy 1:39-45; Leavitt, et al. (1995) Proc. Nat'l Acad. Sci. USA 92:699-703; Leavitt, et al. (1994) Human Gene Therapy 5:1151-120; and Yamada, et al. (1994) Virology 205: 121-126.

[0312] Polynucleotide modulators of bladder cancer may be introduced into a cell containing the target nucleotide sequence by formation of a conjugate with a ligand binding molecule, as described in WO 91/04753. Suitable ligand binding molecules include, but are not limited to, cell surface receptors, growth factors, other cytokines, or other ligands that bind to cell surface receptors. Preferably, conjugation of the ligand binding molecule does not substantially interfere with the ability of the ligand binding molecule to bind to its corresponding molecule or receptor, or block entry of the sense or antisense oligonucleotide or its conjugated version into the cell. Alternatively, a polynucleotide modulator of bladder cancer may be introduced into a cell containing the target nucleic acid sequence, e.g., by formation of an polynucleotide-lipid complex, as described in WO 90/10448. It is understood that the use of antisense molecules or knock out and knock in models may also be used in screening assays as discussed above, in addition to methods of treatment.

[0313] Thus, in one embodiment, methods of modulating bladder cancer in cells or organisms are provided. In one embodiment, the methods comprise administering to a cell an anti-bladder cancer antibody that reduces or eliminates the biological activity of an endogenous bladder cancer protein. Alternatively, the methods comprise administering to a cell or organism a recombinant nucleic acid encoding a bladder cancer protein. This may be accomplished in many ways. In a preferred embodiment, e.g., when the bladder cancer sequence is down-regulated in bladder cancer, such state may be reversed by increasing the amount of bladder cancer gene product in the cell. This can be accomplished, e.g., by overexpressing the endogenous bladder cancer gene or administering a gene encoding the bladder cancer sequence, using known gene-therapy techniques. In a preferred embodiment, the gene therapy techniques include the incorporation of the exogenous gene using enhanced homologous recombination (EHR), e.g., as described in PCT/US93/03868, hereby incorporated by reference in its entirety. Alternatively, e.g., when the bladder cancer sequence is up-regulated in bladder cancer, the activity of the endogenous bladder cancer gene is decreased, e.g., by the administration of a bladder cancer antisense nucleic acid.

[0314] In one embodiment, the bladder cancer proteins of the present invention may be used to generate polyclonal and monoclonal antibodies to bladder cancer proteins. Similarly, the bladder cancer proteins can be coupled, using standard technology, to affinity chromatography columns. These columns may then be used to purify bladder cancer antibodies useful for production, diagnostic, or therapeutic purposes. In a preferred embodiment, the antibodies are generated to epitopes unique to a bladder cancer protein; that is, the antibodies show little or no cross-reactivity to other proteins. The bladder cancer antibodies may be coupled to standard affinity chromatography columns and used to purify bladder cancer proteins. The antibodies may also be used as blocking polypeptides, as outlined above, since they will specifically bind to the bladder cancer protein.

[0315] Methods of Identifying Variant Bladder Cancer-Associated Sequences

[0316] Without being bound by theory, expression of various bladder cancer sequences is correlated with bladder cancer. Accordingly, disorders based on mutant or variant bladder cancer genes may be determined. In one embodiment, the invention provides methods for identifying cells containing variant bladder cancer genes, e.g., determining all or part of the sequence of at least one endogenous bladder cancer genes in a cell. This may be accomplished using many sequencing techniques. In a preferred embodiment, the invention provides methods of identifying the bladder cancer genotype of an individual, e.g., determining all or part of the sequence of at least one bladder cancer gene of the individual. This is generally done in at least one tissue of the individual, and may include the evaluation of a number of tissues or different samples of the same tissue. The method may include comparing the sequence of the sequenced bladder cancer gene to a known bladder cancer gene, e.g., a wild-type gene.

[0317] The sequence of all or part of the bladder cancer gene can then be compared to the sequence of a known bladder cancer gene to determine if differences exist. This can be done using many known homology programs, such as Bestfit, etc. In a preferred embodiment, the presence of a difference in the sequence between the bladder cancer gene of the patient and the known bladder cancer gene correlates with a disease state or a propensity for a disease state, as outlined herein.

[0318] In a preferred embodiment, the bladder cancer genes are used as probes to determine the number of copies of the bladder cancer gene in the genome.

[0319] In another preferred embodiment, the bladder cancer genes are used as probes to determine the chromosomal localization of the bladder cancer genes. Information such as chromosomal localization finds use in providing a diagnosis or prognosis in particular when chromosomal abnormalities such as translocations, and the like are identified in the bladder cancer gene locus.

[0320] Administration of Pharmaceutical and Vaccine Compositions

[0321] In one embodiment, a therapeutically effective dose of a bladder cancer protein or modulator thereof, is administered to a patient. By “therapeutically effective dose” herein is meant a dose that produces effects for which it is administered. The exact dose will depend on the purpose of the treatment, and will be ascertainable by one skilled in the art using known techniques. See, e.g., Ansel, et al. (1999) Pharmaceutical Dosage Forms and Drug Delivery Lippincott; Lieberman (1992) Pharmaceutical Dosage Forms (vols. 1-3) Dekker, ISBN 0824770846, 082476918X, 0824712692, 0824716981; Lloyd (1999) The Art, Science and Technology of Pharmaceutical Compounding Amer. Pharma. Assn.; and Pickar (1999) Dosage Calculations Thomson. As is known in the art, adjustments for bladder cancer degradation, systemic versus localized delivery, and rate of new protease synthesis, as well as the age, body weight, general health, sex, diet, time of administration, drug interaction and the severity of the condition may be necessary, and will be ascertainable with routine experimentation by those skilled in the art. U.S. Ser. No. 09/687,576, further discloses the use of compositions and methods of diagnosis and treatment in bladder cancer and is hereby expressly incorporated by reference.

[0322] A “patient” for the purposes of the present invention includes both humans and other animals, particularly mammals. Thus the methods are applicable to both human therapy and veterinary applications. In the preferred embodiment the patient is a mammal, preferably a primate, and in the most preferred embodiment the patient is human.

[0323] The administration of the bladder cancer proteins and modulators thereof of the present invention can be done in a variety of ways as discussed above, including, but not limited to, orally, subcutaneously, intravenously, intranasally, transdermally, intraperitoneally, intramuscularly, intrapulmonary, vaginally, rectally, or intraocularly. In some instances, e.g., in the treatment of wounds and inflammation, the bladder cancer proteins and modulators may be directly applied as a solution or spray.

[0324] The pharmaceutical compositions of the present invention comprise a bladder cancer protein in a form suitable for administration to a patient. In the preferred embodiment, the pharmaceutical compositions are in a water soluble form, such as being present as pharmaceutically acceptable salts, which is meant to include both acid and base addition salts. “Pharmaceutically acceptable acid addition salt” refers to those salts that retain the biological effectiveness of the free bases and that are not biologically or otherwise undesirable, formed with inorganic acids such as hydrochloric acid, hydrobromic acid, sulfuric acid, nitric acid, phosphoric acid and the like, and organic acids such as acetic acid, propionic acid, glycolic acid, pyruvic acid, oxalic acid, maleic acid, malonic acid, succinic acid, fumaric acid, tartaric acid, citric acid, benzoic acid, cinnamic acid, mandelic acid, methanesulfonic acid, ethanesulfonic acid, p-toluenesulfonic acid, salicylic acid and the like. “Pharmaceutically acceptable base addition salts” include those derived from inorganic bases such as sodium, potassium, lithium, ammonium, calcium, magnesium, iron, zinc, copper, manganese, aluminum salts and the like. Particularly preferred are the ammonium, potassium, sodium, calcium, and magnesium salts. Salts derived from pharmaceutically acceptable organic non-toxic bases include salts of primary, secondary, and tertiary amines, substituted amines including naturally occurring substituted amines, cyclic amines and basic ion exchange resins, such as isopropylamine, trimethylamine, diethylamine, triethylamine, tripropylamine, and ethanolamine.

[0325] The pharmaceutical compositions may also include one or more of the following: carrier proteins such as serum albumin; buffers; fillers such as microcrystalline cellulose, lactose, corn and other starches; binding agents; sweeteners and other flavoring agents; coloring agents; and polyethylene glycol.

[0326] The pharmaceutical compositions can be administered in a variety of unit dosage forms depending upon the method of administration. For example, unit dosage forms suitable for oral administration include, but are not limited to, powder, tablets, pills, capsules and lozenges. It is recognized that bladder cancer protein modulators (e.g., antibodies, antisense constructs, ribozymes, small organic molecules, etc.) when administered orally, should be protected from digestion. This is typically accomplished either by complexing the molecule(s) with a composition to render it resistant to acidic and enzymatic hydrolysis, or by packaging the molecule(s) in an appropriately resistant carrier, such as a liposome or a protection barrier. Means of protecting agents from digestion are well known in the art.

[0327] The compositions for administration will commonly comprise a bladder cancer protein modulator dissolved in a pharmaceutically acceptable carrier, preferably an aqueous carrier. A variety of aqueous carriers can be used, e.g., buffered saline and the like. These solutions are sterile and generally free of undesirable matter. These compositions may be sterilized by conventional, well known sterilization techniques. The compositions may contain pharmaceutically acceptable auxiliary substances as required to approximate physiological conditions such as pH adjusting and buffering agents, toxicity adjusting agents and the like, e.g., sodium acetate, sodium chloride, potassium chloride, calcium chloride, sodium lactate and the like. The concentration of active agent in these formulations can vary widely, and will be selected primarily based on fluid volumes, viscosities, body weight and the like in accordance with the particular mode of administration selected and the patient's needs (e.g., Remington's Pharmaceutical Science (15th ed., 1980) and Hardman and Limbird (eds. 2001) Goodman and Gilman: The Pharmacologial Basis of Therapeutics McGraw-Hill.

[0328] Thus, a typical pharmaceutical composition for intravenous administration would be about 0.1-10 mg per patient per day. Dosages from about 0.1-100 mg per patient per day may be used, particularly when the drug is administered to a secluded site and not into the blood stream, such as into a body cavity or into a lumen of an organ. Substantially higher dosages are possible in topical administration. Actual methods for preparing parenterally administrable compositions will be known or apparent to those skilled in the art, e.g., Remington's Pharmaceutical Science and Goodman and Gilman: The Pharmacologial Basis of Therapeutics, supra.

[0329] The compositions containing modulators of bladder cancer proteins can be administered for therapeutic or prophylactic treatments. In therapeutic applications, compositions are administered to a patient suffering from a disease (e.g., a cancer) in an amount sufficient to cure or at least partially arrest the disease and its complications. An amount adequate to accomplish this is defined as a “therapeutically effective dose.” Amounts effective for this use will depend upon the severity of the disease and the general state of the patient's health. Single or multiple administrations of the compositions may be administered depending on the dosage and frequency as required and tolerated by the patient. The composition should provide a sufficient quantity of the agents of this invention to effectively treat the patient. An amount of modulator that is capable of preventing or slowing the development of cancer in a mammal is referred to as a “prophylactically effective dose.” The particular dose required for a prophylactic treatment will depend upon the medical condition and history of the mammal, the particular cancer being prevented, as well as other factors such as age, weight, gender, administration route, efficiency, etc. Such prophylactic treatments may be used, e.g., in a mammal who has previously had cancer to prevent a recurrence of the cancer, or in a mammal who is suspected of having a significant likelihood of developing cancer based, at least in part, upon gene expression profiles. Vaccine strategies may be used, in either a DNA vaccine form, or protein vaccine.

[0330] It will be appreciated that the present bladder cancer protein-modulating compounds can be administered alone or in combination with additional bladder cancer modulating compounds or with other therapeutic agent, e.g., other anti-cancer agents or treatments.

[0331] In numerous embodiments, one or more nucleic acids, e.g., polynucleotides comprising nucleic acid sequences set forth in Tables 1A-13, such as antisense polynucleotides or ribozymes, will be introduced into cells, in vitro or in vivo. The present invention provides methods, reagents, vectors, and cells useful for expression of bladder cancer-associated polypeptides and nucleic acids using in vitro (cell-free), ex vivo, or in vivo (cell or organism-based) recombinant expression systems.

[0332] The particular procedure used to introduce the nucleic acids into a host cell for expression of a protein or nucleic acid is application specific. Many procedures for introducing foreign nucleotide sequences into host cells may be used. These include the use of calcium phosphate transfection, spheroplasts, electroporation, liposomes, microinjection, plasma vectors, viral vectors, and other methods for introducing cloned genomic DNA, cDNA, synthetic DNA or other foreign genetic material into a host cell. See, e.g., Berger and Kimmel (1987) Guide to Molecular Cloning Techniques from Methods in Enzymology (vol.

[0333] 152) Academic Press; Ausubel, et al. (eds. 1999 and supplements) Current Protocols in Molecular Biology Lippincott; and Sambrook, et al. (1989) Molecular Cloning: A Laboratory Manual (2d ed., Vol. 1-3) CSH Press.

[0334] In a preferred embodiment, bladder cancer proteins and modulators are administered as therapeutic agents, and can be formulated as outlined above. Similarly, bladder cancer genes (including both the full-length sequence, partial sequences, or regulatory sequences of the bladder cancer coding regions) can be administered in a gene therapy application. These bladder cancer genes can include antisense applications, either as gene therapy (e.g., for incorporation into the genome) or as antisense compositions, as will be appreciated by those in the art.

[0335] Bladder cancer polypeptides and polynucleotides can also be administered as vaccine compositions to stimulate HTL, CTL, and antibody responses. Such vaccine compositions can include, e.g., lipidated peptides (Vitiello, et al. (1995) J. Clin. Invest. 95:341-349); peptide compositions encapsulated in poly(DL-lactide-co-glycolide) (“PLG”) microspheres (Eldridge, et al. (1991) Molec. Immunol. 28:287-294; Alonso, et al. (1994) Vaccine 12:299-306; Jones, et al. (1995) Vaccine 13:675-681); peptide compositions contained in immune stimulating complexes (ISCOMS) (Takahashi, et al. (1990) Nature 344:873-875; Hu, et al. (1998) Clin. Exp. Immunol. 113:235-243); multiple antigen peptide systems (MAPs) (Tam (1988) Proc. Nat'l Acad. Sci. USA 85:5409-5413; Tam (1996) J. Immunol. Methods 196:17-32); peptides formulated as multivalent peptides; peptides for use in ballistic delivery systems, typically crystallized peptides, viral delivery vectors (Perkus, et al. in Kaufmann (ed. 1996) Concepts in Vaccine Development de Gruyter; Chakrabarti, et al. (1986) Nature 320:535-537; Hu, et al. (1986) Nature 320:537-547; Kieny, et al. (1986) AIDS Bio/Technology4:790; Top, et al. (1971) J. Infect. Dis. 124:148-154; Chanda, et al. (1990) Virology 175:535-547), particles of viral or synthetic origin (see, e.g., Kofler, et al. (1996) J. Immunol. Methods 192:25-35; Eldridge, et al. (1993) Sem. Hematol. 30:16-24; Falo, et al. (1995) Nature Med. 7:649-653), adjuvants (Warren, et al. (1986) Annu. Rev. Immunol. 4:369-388; Gupta, et al. (1993) Vaccine 11:293-306), liposomes (Reddy, et al. (1992) J. Immunol. 148:1585-1589; Rock (1996) Immunol. Today 17:131-137), or, naked or particle absorbed cDNA (Ulmer, et al. (1993) Science 259:1745-1749; Robinson, et al. (1993) Vaccine 11:957-960; Shiver, et al. in Kaufmann (ed. 1996) Concepts in Vaccine Development de Gruyter; Cease and Berzofsky (1994) Annu. Rev. Immunol. 12:923-989; and Eldridge, et al. (1993) Sem. Hematol. 30:16-24). Toxin-targeted delivery technologies, also known as receptor mediated targeting, such as those of Avant Immunotherapeutics, Inc., Needham, Mass., may also be used.

[0336] Vaccine compositions often include adjuvants. Many adjuvants contain a substance designed to protect the antigen from rapid catabolism, such as aluminum hydroxide or mineral oil, and a stimulator of immune responses, such as lipid A, Bortadella pertussis or Mycobacterium tuberculosis derived proteins. Certain adjuvants are commercially available as, e.g., Freund's Incomplete Adjuvant and Complete Adjuvant (Difco Laboratories, Detroit, Mich.); Merck Adjuvant 65 (Merck and Company, Inc., Rahway, N.J.); AS-2 (SmithKline Beecham, Philadelphia, Pa.); aluminum salts such as aluminum hydroxide gel (alum) or aluminum phosphate; salts of calcium, iron or zinc; an insoluble suspension of acylated tyrosine; acylated sugars; cationically or anionically derivatized polysaccharides; polyphosphazenes; biodegradable microspheres; monophosphoryl lipid A and quil A. Cytokines, such as GM-CSF, interleukin-2,-7,-12, and other like growth factors, may also be used as adjuvants.

[0337] Vaccines can be administered as nucleic acid compositions wherein DNA or RNA encoding one or more of the polypeptides, or a fragment thereof, is administered to a patient. This approach is described, for instance, in Wolff, et al. (1990) Science 247:1465-1468 as well as U.S. Pat. Nos. 5,580,859; 5,589,466; 5,804,566; 5,739,118; 5,736,524; 5,679,647; WO 98/04720; and in more detail below. Examples of DNA-based delivery technologies include “naked DNA”, facilitated (bupivicaine, polymers, peptide-mediated) delivery, cationic lipid complexes, and particle-mediated (“gene gun”) or pressure-mediated delivery (see, e.g., U.S. Pat. No. 5,922,687).

[0338] For therapeutic or prophylactic immunization purposes, the peptides of the invention can be expressed by viral or bacterial vectors. Examples of expression vectors include attenuated viral hosts, such as vaccinia or fowlpox. This approach involves the use of vaccinia virus, e.g., as a vector to express nucleotide sequences that encode bladder cancer polypeptides or polypeptide fragments. Upon introduction into a host, the recombinant vaccinia virus expresses the immunogenic peptide, and thereby elicits an immune response. Vaccinia vectors and methods useful in immunization protocols are described in, e.g., U.S. Pat. No. 4,722,848. Another vector is BCG (Bacille Calmette Guerin). BCG vectors are described in Stover, et al. (1991) Nature 351:456-460. A wide variety of other vectors useful for therapeutic administration or immunization, e.g., adeno and adeno-associated virus vectors, retroviral vectors, Salmonella typhi vectors, detoxified anthrax toxin vectors, and the like. See, e.g., Shata, et al. (2000) Mol Med Today 6:66-71; Shedlock, et al. (2000) J. Leukoc. Biol. 68:793-806; Hipp, et al. (2000) In Vivo 14:571-85.

[0339] Methods for the use of genes as DNA vaccines are well known, and include placing a bladder cancer gene or portion of a bladder cancer gene under the control of a regulatable promoter or a tissue-specific promoter for expression in a bladder cancer patient. The bladder cancer gene used for DNA vaccines can encode full-length bladder cancer proteins, but more preferably encodes portions of the bladder cancer proteins including peptides derived from the bladder cancer protein. In one embodiment, a patient is immunized with a DNA vaccine comprising a plurality of nucleotide sequences derived from a bladder cancer gene. For example, bladder cancer-associated genes or sequence encoding subfragments of a bladder cancer protein are introduced into expression vectors and tested for their immunogenicity in the context of Class I MHC and an ability to generate cytotoxic T cell responses. This procedure provides for production of cytotoxic T cell responses against cells which present antigen, including intracellular epitopes.

[0340] In a preferred embodiment, the DNA vaccines include a gene encoding an adjuvant molecule with the DNA vaccine. Such adjuvant molecules include cytokines that increase the immunogenic response to the bladder cancer polypeptide encoded by the DNA vaccine. Additional or alternative adjuvants are available.

[0341] In another preferred embodiment bladder cancer genes find use in generating animal models of bladder cancer. When the bladder cancer gene identified is repressed or diminished in cancer tissue, gene therapy technology, e.g., wherein antisense RNA directed to the bladder cancer gene will also diminish or repress expression of the gene. Animal models of bladder cancer find use in screening for modulators of a bladder cancer-associated sequence or modulators of bladder cancer. Similarly, transgenic animal technology including gene knockout technology, e.g., as a result of homologous recombination with an appropriate gene targeting vector, will result in the absence or increased expression of the bladder cancer protein. When desired, tissue-specific expression or knockout of the bladder cancer protein may be necessary.

[0342] It is also possible that the bladder cancer protein is overexpressed in bladder cancer. As such, transgenic animals can be generated that overexpress the bladder cancer protein. Depending on the desired expression level, promoters of various strengths can be employed to express the transgene. Also, the number of copies of the integrated transgene can be determined and compared for a determination of the expression level of the transgene. Animals generated by such methods find use as animal models of bladder cancer and are additionally useful in screening for modulators to treat bladder cancer.

[0343] Kits for Use in Diagnostic and/or Prognostic Applications

[0344] For use in diagnostic, research, and therapeutic applications suggested above, kits are also provided by the invention. In the diagnostic and research applications such kits may include one or more of the following: assay reagents, buffers, bladder cancer-specific nucleic acids or antibodies, hybridization probes and/or primers, antisense or inhibitory polynucleotides, ribozymes, dominant negative bladder cancer polypeptides or polynucleotides, small molecules inhibitors of bladder cancer-associated sequences etc. A therapeutic product may include sterile saline or another pharmaceutically acceptable emulsion and suspension base.

[0345] In addition, the kits may include instructional materials containing directions (e.g., protocols) for the practice of the methods of this invention. While the instructional materials typically comprise written or printed materials they are not limited to such. A medium capable of storing such instructions and communicating them to an end user is contemplated by this invention. Such media include, but are not limited to electronic storage media (e.g., magnetic discs, tapes, cartridges, chips), optical media (e.g., CD ROM), and the like. Such media may include addresses to internet sites that provide such instructional materials.

[0346] The present invention also provides for kits for screening for modulators of bladder cancer-associated sequences. Such kits can be prepared from readily available materials and reagents. For example, such kits can comprise one or more of the following materials: a bladder cancer-associated polypeptide or polynucleotide, control positive or negative samples, reaction tubes, and instructions for testing bladder cancer-associated activity. Optionally, the kit contains biologically active bladder cancer protein. A wide variety of kits and components can be prepared according to the present invention, depending upon the intended user of the kit and the particular needs of the user. Diagnosis would typically involve evaluation of a plurality of genes or products. The genes will be selected based on correlations with important parameters in disease which may be identified in historical or outcome data.

### EXAMPLES

### Example 1

### Gene Chip Analysis

[0347] Molecular profiles of various normal and cancerous tissues were determined and analyzed using gene chips. RNA was isolated and gene chip analysis was performed as described (Glynne, et al. (2000) Nature 403:672-676; Zhao, et al. (2000) Genes Dev. 14:981-993).

### Table Descriptions

[0348] Table 1A shows about 3413 that exhibit increased or decreased expression in bladder cancer samples. See U.S. S No. 60/302,814.

[0349] Table 2A shows about 485 genes overexpressed in bladder tumors relative to normal tissues as analyzed using the Affymetrix/Eos Hu03 GeneChip array. See U.S. S No. 60/343,705.

[0350] Table 3A shows about 414 genes upregulated in bladder cancer relative to normal body tissues and preferred for utility as small molecule, antibody, DNA vaccine targets for the therapy of bladder cancer. These genes were selected from 59680 probesets on the Eos/Affymetrix Hu03 Genechip array. Gene expression data for each probeset obtained from this analysis was expressed as average intensity (AI), a normalized value reflecting the relative level of mRNA expression.

[0351] Table 4A shows about 129 genes upregulated in bladder cancer relative to normal body tissues and preferred for utility as diagnostics of bladder cancer. These genes were selected from 59680 probesets on the Eos/Affymetrix Hu03 Genechip array. Gene expression data for each probeset obtained from this analysis was expressed as average intensity (AI), a normalized value reflecting the relative level of mRNA expression.

[0352] Table 5A shows about 149 genes upregulated in bladder cancer relative to normal body tissues. These genes were selected from 59680 probesets on the Eos/Affymetrix Hu03 Genechip array. Gene expression data for each probeset obtained from this analysis was expressed as average intensity (AI), a normalized value reflecting the relative level of mRNA expression.

[0353] Table 6A shows about 199 genes upregulated in bladder cancer relative to normal bladder tissue. These genes were selected from 59680 probesets on the Eos/Affymetrix Hu03 Genechip array. Gene expression data for each probeset obtained from this analysis was expressed as average intensity (AI), a normalized value reflecting the relative level of mRNA expression.

[0354] Table 7A shows about 63 genes downregulated in bladder tumors relative to normal bladder. These genes were selected from 59680 probesets on the Eos/Affymetrix Hu03 Genechip array. Gene expression data for each probeset obtained from this analysis was expressed as average intensity (AI), a normalized value reflecting the relative level of mRNA expression.

[0355] Table 8A shows about 1440 genes upregulated in Ta or Ti bladder tumors from patients who later presented with muscle-invasive bladder tumors (stage T2-T4). Gene expression data for each probeset obtained from this analysis was expressed as average intensity (AI), a normalized value reflecting the relative level of mRNA expression.

[0356] Table 9A shows about 1200 genes upregulated in Ta or TI tumors of patients who later presented with either more Ta tumors or no tumors at all. Gene expression data for each probeset obtained from this analysis was expressed as average intensity (AI), a normalized value reflecting the relative level of mRNA expression.

[0357] Table 10A shows about 65 genes upregulated in non-invasive exophytic Ta bladder tumors relative to T2-T4 muscle-invasive tumors. Gene expression data for each probeset obtained from this analysis was expressed as average intensity (AI), a normalized value reflecting the relative level of mRNA expression.

[0358] Table 11A shows about 106 genes upregulated in muscle-invasive T2-T4 bladder tumors relative to non-invasive exophytic Ta bladder tumors. Gene expression data for each probeset obtained from this analysis was expressed as average intensity (AI), a normalized value reflecting the relative level of mRNA expression.

[0359] Table 12A shows the Pkey, ExAccn, UnigeneID, and Unigene Title for all of the sequences in Table 13. Seq ID No. is used to link Table 12A to table 13.

[0360] Tables 1B-12B show the accession numbers for those Pkey's lacking UnigeneID's for tables 1A-12A, respectively. For each probeset is listed a gene cluster number from which oligonucleotides were designed. Gene clusters were compiled using sequences derived from Genbank ESTs and mRNAs. These sequences were clustered based on sequence similarity using Clustering and Alignment Tools (DoubleTwist, Oakland Calif.). Genbank accession numbers for sequences comprising each cluster are listed in the “Accession” column.

[0361] Tables 1C-12C show genomic positioning for Pkey's lacking Unigene ID's and accession numbers for tables 1A-12A, respectively. For each predicted exon, is listed genomic sequence source used for prediction. Nucleotide locations of each predicted exon are also listed.

TABLE 1A

| Pkey | ExAccn | UnigeneID | Unigene Title | R1 | R2 | Target Type |
|---|---|---|---|---|---|---|
| 400440 | X83957 | Hs.83870 | nebulin | 0.17 | 2.05 | downregulate stage |
| 400888 | | | | 0.24 | 1.97 | downregulate stage |
| 401566 | | | | 0.19 | 4.06 | downregulate stage |
| 401669 | | | | 0.2 | 2.05 | downregulate stage |
| 401691 | | | | 0.04 | 10.13 | downregulate stage |
| 401905 | | | | 0.3 | 1.87 | downregulate stage |
| 402076 | | | | 0.06 | 6.51 | downregulate stage |
| 402110 | | | | 0.43 | 2.35 | downregulate stage |
| 402271 | NM_002197 | Hs.154721 | aconitase 1, soluble | 0.21 | 2.16 | downregulate stage |
| 403362 | | | | 0.18 | 4.44 | downregulate stage |
| 403687 | | | | 0.32 | 1.91 | downregulate stage |
| 403959 | | | | 0.14 | 2.27 | downregulate stage |
| 404015 | | | | 0.2 | 2.48 | downregulate stage |
| 404059 | | | | 0.36 | 1.84 | downregulate stage |
| 404152 | | | | 0.32 | 1.85 | downregulate stage |
| 404498 | | | | 0.14 | 2.18 | downregulate stage |
| 404819 | | | | 0.19 | 5.25 | downregulate stage |
| 405001 | U58196 | Hs.296281 | interleukin enhancer binding factor 1 | 0.16 | 2.92 | downregulate stage |
| 405349 | | | | 0.18 | 3.8 | downregulate stage |
| 405390 | | | | 0.3 | 2.54 | downregulate stage |
| 405735 | | | | 0.13 | 2.44 | downregulate stage |
| 405968 | | | | 0.26 | 1.85 | downregulate stage |
| 406017 | | | | 0.32 | 2.28 | downregulate stage |
| 406305 | BE261320 | Hs.297096 | transcriptional adaptor 3 (ADA3, yeast h | 0.42 | 1.93 | downregulate stage |
| 406320 | | | | 0.37 | 2.01 | downregulate stage |
| 406704 | M21665 | Hs.929 | myosin, heavy polypeptide 7, cardiac mus | 0.3 | 2.84 | downregulate stage |
| 406706 | X03740 | Hs.231581 | myosin, heavy polypeptide 1, skeletal mu | 0.14 | 7.4 | downregulate stage |
| 406707 | S73840 | Hs.931 | myosin, heavy polypeptide 2, skeletal mu | 0.05 | 12.51 | downregulate stage |
| 407013 | U35637 | | gb: Human nebulin mRNA, partial cds | 0.14 | 2.17 | downregulate stage |
| 407245 | X90568 | Hs.172004 | titin | 0.02 | 15.21 | downregulate stage |
| 407330 | AA582607 | | gb: nn51b05.s1 NCI_CGAP_Kid6 Homo sapiens | 0.42 | 1.87 | downregulate stage |
| 407571 | AI446183 | Hs.9572 | ESTs | 0.38 | 2.13 | downregulate stage |
| 407682 | AL035858 | Hs.3807 | FXYD domain-containing ion transport reg | 0.34 | 2.56 | downregulate stage |
| 407815 | AW373860 | Hs.301716 | ESTs | 0.31 | 2.44 | downregulate stage |
| 407834 | AW084991 | Hs.26100 | ESTs | 0.15 | 2.98 | downregulate stage |
| 407891 | AA486620 | Hs.41135 | endomucin-2 | 0.15 | 3.33 | downregulate stage |
| 407906 | AA369665 | Hs.41185 | Homo sapiens mRNA; cDNA DKFZp564O1262 (f | 0.12 | 8.05 | downregulate stage |
| 407938 | AA905097 | Hs.85050 | phospholamban | 0.08 | 8.77 | downregulate stage |
| 407965 | W21483 | Hs.41707 | heat shock 27 kD protein 3 | 0.26 | 2.29 | downregulate stage |
| 408009 | AF020498 | Hs.41735 | purinergic receptor P2X, ligand-gated io | 0.49 | 1.91 | downregulate stage |
| 408139 | AA451966 | Hs.43005 | RAB9-like protein | 0.41 | 1.88 | downregulate stage |
| 408221 | AA912183 | Hs.47447 | ESTs | 0.04 | 24.1 | downregulate stage |
| 408374 | AW025430 | Hs.155591 | forkhead box F1 | 0.35 | 2.85 | downregulate stage |
| 408493 | BE206854 | Hs.46039 | phosphoglycerate mutase 2 (muscle) | 0.09 | 9.04 | downregulate stage |
| 408508 | AI806109 | Hs.135736 | KIAA1580 protein | 0.45 | 2.2 | downregulate stage |
| 408614 | AL137698 | Hs.46531 | Homo sapiens mRNA; cDNA DKFZp434C1915 (f | 0.13 | 5.48 | downregulate stage |
| 408652 | R43409 | Hs.6829 | ESTs | 0.33 | 2.5 | downregulate stage |
| 408753 | AI337192 | Hs.47438 | SH3 domain binding glutamic acid-rich pr | 0.05 | 6.94 | downregulate stage |
| 408896 | AI610447 | Hs.48778 | niban protein | 0.39 | 2.01 | downregulate stage |
| 409277 | T05558 | Hs.156880 | ESTs | 0.18 | 2.75 | downregulate stage |
| 410023 | AB017169 | Hs.57929 | slit (Drosophila) homolog 3 | 0.07 | 2.7 | downregulate stage |
| 410036 | R57171 | Hs.57975 | calsequestrin 2, cardiac muscle | 0.09 | 5.23 | downregulate stage |
| 410132 | NM_003480 | Hs.58882 | Microfibril-associated glycoprotein-2 | 0.24 | 2.34 | downregulate stage |
| 410168 | AW834050 | Hs.9973 | tensin | 0.39 | 2.17 | downregulate stage |
| 410243 | D83402 | Hs.289006 | ESTs, Weakly similar to alternatively sp | 0.11 | 2.82 | downregulate stage |
| 410339 | AI916499 | Hs.298258 | ESTs | 0.15 | 2.16 | downregulate stage |
| 410677 | NM_003278 | Hs.65424 | tetranectin (plasminogen-binding protein | 0.32 | 2.65 | downregulate stage |
| 410868 | T06529 | Hs.98518 | Homo sapiens cDNA FLJ11490 fis, clone HE | 0.2 | 2.74 | downregulate stage |
| 411048 | AK001742 | Hs.67991 | hypothetical protein DKFZp434G0522 | 0.2 | 1.92 | downregulate stage |
| 411067 | AI681006 | Hs.301543 | ESTs | 0.11 | 3.41 | downregulate stage |
| 411069 | AL133092 | Hs.68055 | hypothetical protein DKFZp434I0428 | 0.17 | 5.8 | downregulate stage |
| 411644 | H92064 | Hs.301548 | ESTs | 0.06 | 13.8 | downregulate stage |
| 411741 | AW859650 | | gb: RC0-CT0358-071299-011-d03 CT0358 Homo | 0.36 | 2.5 | downregulate stage |
| 412047 | AA934589 | Hs.49696 | ESTs | 0.18 | 3.57 | downregulate stage |
| 412095 | AI624707 | Hs.5921 | Homo sapiens cDNA: FLJ21592 fis, clone C | 0.32 | 1.89 | downregulate stage |
| 412389 | AW947655 | | gb: RC0-MT0003-140300-031-b07 MT0003 Homo | 0.38 | 2.6 | downregulate stage |
| 412442 | AI983730 | Hs.26530 | serum deprivation response (phosphatidyl | 0.12 | 3.67 | downregulate stage |
| 412519 | AA196241 | Hs.73980 | troponin T1, skeletal, slow | 0.24 | 1.86 | downregulate stage |
| 412622 | AW664708 | Hs.171959 | ESTs | 0.06 | 5.45 | downregulate stage |
| 412649 | NM_002206 | Hs.74369 | integrin, alpha 7 | 0.29 | 2.95 | downregulate stage |
| 412659 | AW753865 | Hs.74376 | olfactomedin related ER localized protei | 0.18 | 2.06 | downregulate stage |
| 412758 | Y07818 | Hs.74566 | dihydropyrimidinase-like 3 | 0.3 | 2.23 | downregulate stage |
| 412802 | U41518 | Hs.74602 | aquaporin 1 (channel-forming integral pr | 0.11 | 2.71 | downregulate stage |
| 412975 | T70956 | Hs.75106 | clusterin (complement lysis inhibitor, S | 0.44 | 2.03 | downregulate stage |
| 413074 | AI871368 | Hs.8417 | ESTs | 0.47 | 1.91 | downregulate stage |
| 413272 | AA127923 | Hs.293256 | ESTs | 0.09 | 4.44 | downregulate stage |
| 413276 | Z24725 | Hs.75260 | mitogen inducible 2 | 0.23 | 2.48 | downregulate stage |
| 413508 | BE145364 | | gb: IL0-HT0198-151099-125-e05 HT0198 Homo | 0.31 | 2.53 | downregulate stage |
| 413624 | BE177019 | Hs.75445 | SPARC-like 1 (mast9, hevin) | 0.33 | 2.17 | downregulate stage |
| 413778 | AA090235 | Hs.75535 | myosin, light polypeptide 2, regulatory, | 0.33 | 2.63 | downregulate stage |
| 414063 | H26904 | Hs.75736 | apolipoprotein D | 0.42 | 1.85 | downregulate stage |
| 414241 | AA425085 | Hs.4007 | Sarcolemmal-associated protein | 0.16 | 2.22 | downregulate stage |
| 414290 | AI568801 | Hs.71721 | ESTs | 0.02 | 10 | downregulate stage |
| 414629 | AA345824 | Hs.76688 | carboxylesterase 1 (monocyte/macrophage | 0.13 | 4.14 | downregulate stage |
| 414657 | AA424074 | Hs.76780 | protein phosphatase 1, regulatory (inhib | 0.33 | 2.14 | downregulate stage |
| 414712 | N88858 | Hs.77039 | ribosomal protein S3A | 0.4 | 2.5 | downregulate stage |
| 414903 | AA451700 | Hs.85835 | Homo sapiens cDNA: FLJ22841 fis, clone K | 0.3 | 3.3 | downregulate stage |
| 415165 | AW887604 | Hs.78065 | complement component 7 | 0.04 | 3.41 | downregulate stage |
| 415274 | AF001548 | Hs.78344 | myosin, heavy polypeptide 11, smooth mus | 0.2 | 3.29 | downregulate stage |
| 415447 | Z97171 | Hs.78454 | myocilin, trabecular meshwork inducible | 0.15 | 6.55 | downregulate stage |
| 415672 | N53097 | Hs.193579 | ESTs | 0.28 | 3.55 | downregulate stage |
| 415934 | NM_000928 | Hs.992 | phospholipase A2, group IB (pancreas) | 0.34 | 2.64 | downregulate stage |
| 416127 | N49843 | Hs.79022 | GTP-binding protein overexpressed in ske | 0.3 | 1.98 | downregulate stage |
| 416349 | X69089 | Hs.79227 | myomesin (M-protein) 2 (165 kD) | 0.41 | 1.96 | downregulate stage |
| 416585 | X54162 | Hs.79386 | leiomodin 1 (smooth muscle) | 0.02 | 49.3 | downregulate stage |
| 416854 | H40164 | Hs.80296 | Purkinje cell protein 4 | 0.02 | 7.55 | downregulate stage |
| 416941 | BE000150 | Hs.48778 | niban protein | 0.27 | 2.16 | downregulate stage |
| 416982 | J05401 | Hs.80691 | creatine kinase, mitochondrial 2 (sarcom | 0.29 | 2.43 | downregulate stage |
| 417011 | F08212 | Hs.234898 | ESTs | 0.41 | 2.06 | downregulate stage |
| 417298 | AW665639 | Hs.37958 | ESTs | 0.27 | 3.7 | downregulate stage |
| 417501 | AL041219 | Hs.82222 | sema domain, immunoglobulin domain (lg), | 0.39 | 2.08 | downregulate stage |
| 417553 | L09190 | Hs.82276 | trichohyalin | 0.29 | 2.59 | downregulate stage |
| 417987 | AA210872 | Hs.50133 | ESTs | 0.22 | 2.09 | downregulate stage |
| 418297 | R91254 | | gb: yp94e12.s1 Soares fetal liver spleen | 0.28 | 1.9 | downregulate stage |
| 418332 | R34976 | Hs.78293 | ESTs | 0.2 | 3.9 | downregulate stage |
| 418391 | NM_003281 | Hs.84673 | troponin I, skeletal, slow | 0.35 | 2.02 | downregulate stage |
| 418409 | AA219332 | Hs.120869 | ESTs, Weakly similar to AF092922 1 retin | 0.21 | 3.8 | downregulate stage |
| 418421 | R58620 | Hs.85050 | phospholamban | 0.2 | 2.08 | downregulate stage |
| 418489 | U76421 | Hs.85302 | adenosine deaminase, RNA-specific, B1 (h | 0.05 | 21.55 | downregulate stage |
| 418533 | NM_004533 | Hs.85937 | myosin-binding protein C, fast-type | 0.42 | 1.95 | downregulate stage |
| 418787 | AW296134 | Hs.86999 | ESTs | 0.48 | 1.87 | downregulate stage |
| 418793 | AW382987 | Hs.88474 | prostaglandin-endoperoxide synthase 1 (p | 0.26 | 2.43 | downregulate stage |
| 418947 | W52990 | Hs.22860 | ESTs | 0.13 | 7.18 | downregulate stage |
| 419037 | R39895 | Hs.7864 | ESTs | 0.27 | 2 | downregulate stage |
| 419441 | AW023731 | Hs.274368 | Homo sapiens mRNA; cDNA DKFZp586I1524 (f | 0.19 | 5.25 | downregulate stage |
| 419535 | AW139550 | Hs.115173 | ESTs | 0.31 | 2.59 | downregulate stage |
| 419682 | H13139 | Hs.92282 | paired-like homeodomain transcription fa | 0.28 | 2.38 | downregulate stage |
| 419685 | W76083 | Hs.173077 | ESTs | 0.4 | 2.21 | downregulate stage |
| 419703 | AI793257 | Hs.128151 | ESTs | 0.09 | 3.52 | downregulate stage |
| 419942 | U25138 | Hs.93841 | potassium large conductance calcium-acti | 0.28 | 2.96 | downregulate stage |
| 420058 | AK001423 | Hs.94694 | Homo sapiens cDNA FLJ10561 fis, clone NT | 0.3 | 2.09 | downregulate stage |
| 420195 | N44348 | Hs.300794 | ESTs | 0.22 | 2.79 | downregulate stage |
| 420261 | AW206093 | Hs.748 | fibroblast growth factor receptor 1 (fms | 0.35 | 1.98 | downregulate stage |
| 420674 | NM_000055 | Hs.1327 | butyrylcholinesterase | 0.29 | 3.5 | downregulate stage |
| 421296 | NM_002666 | Hs.103253 | perilipin | 0.36 | 2.11 | downregulate stage |
| 421639 | NM_012082 | Hs.297921 | Homo sapiens mRNA full length insert cDN | 0.13 | 4.3 | downregulate stage |
| 421763 | AW163500 | Hs.108080 | cysteine and glycine-rich protein 1 | 0.26 | 3.49 | downregulate stage |
| 421853 | AL117472 | Hs.108924 | DKFZP586P1422 protein | 0.14 | 5 | downregulate stage |
| 422103 | AA984330 | Hs.111676 | protein kinase H11; small stress protein | 0.2 | 2.29 | downregulate stage |
| 422287 | F16365 | Hs.114346 | cytochrome c oxidase subunit VIIa polype | 0.27 | 2.58 | downregulate stage |
| 422320 | AI745249 | Hs.23650 | ESTs, Weakly similar to AAB47496 NG5 [H. | 0.24 | 2.95 | downregulate stage |
| 422633 | X56832 | Hs.118804 | enolase 3, (beta, muscle) | 0.23 | 3.57 | downregulate stage |
| 422639 | AI929377 | Hs.173724 | creatine kinase, brain | 0.39 | 1.97 | downregulate stage |
| 423334 | AK000906 | Hs.127273 | hypothetical protein FLJ10044 | 0.37 | 2.29 | downregulate stage |
| 423587 | AA328074 | Hs.284256 | hypothetical protein FLJ14033 similar to | 0.37 | 2.47 | downregulate stage |
| 423889 | AL035447 | Hs.134594 | hypothetical protein LOC57158 | 0.24 | 2.43 | downregulate stage |
| 424181 | AL039482 | Hs.142517 | Homo sapiens mRNA; cDNA DKFZp434P0810 (f | 0.27 | 2.28 | downregulate stage |
| 424206 | NM_003734 | Hs.198241 | amine oxidase, copper containing 3 (vasc | 0.3 | 2.59 | downregulate stage |
| 424479 | AF064238 | Hs.149098 | smoothelin | 0.26 | 3.29 | downregulate stage |
| 424580 | AA446539 | Hs.35092 | ESTs | 0.15 | 2.57 | downregulate stage |
| 424846 | AU077324 | Hs.1832 | neuropeptide Y | 0.4 | 2.04 | downregulate stage |
| 424938 | AW102607 | Hs.245233 | ESTs | 0.29 | 2.16 | downregulate stage |
| 424982 | U94777 | Hs.154084 | phosphorylase, glycogen; muscle (McArdle | 0.42 | 1.89 | downregulate stage |
| 425383 | D83407 | Hs.156007 | Down syndrome critical region gene 1-lik | 0.14 | 1.86 | downregulate stage |
| 425545 | N98529 | Hs.158295 | Human mRNA for myosin light chain 3 (MLC | 0.03 | 13.25 | downregulate stage |
| 425622 | AW360847 | Hs.16578 | ESTs | 0.3 | 2.19 | downregulate stage |
| 425751 | T19239 | Hs.1940 | crystallin, alpha B | 0.47 | 1.92 | downregulate stage |
| 425869 | AA524547 | Hs.160318 | FXYD domain-containing ion transport reg | 0.45 | 1.85 | downregulate stage |
| 425887 | AL049443 | Hs.161283 | Homo sapiens mRNA; cDNA DKFZp586N2020 (f | 0.19 | 2.85 | downregulate stage |
| 425932 | M81650 | Hs.1968 | semenogelin I | 0.02 | 16.3 | downregulate stage |
| 426354 | NM_004010 | Hs.169470 | dystrophin (muscular dystrophy, Duchenne | 0.27 | 2.52 | downregulate stage |
| 426429 | X73114 | Hs.169849 | myosin-binding protein C, slow-type | 0.1 | 10.3 | downregulate stage |
| 426752 | X69490 | Hs.172004 | titin | 0.03 | 31.3 | downregulate stage |
| 426809 | BE313114 | Hs.29706 | ESTs | 0.34 | 2.95 | downregulate stage |
| 427078 | AI676062 | Hs.111902 | ESTs | 0.22 | 2.11 | downregulate stage |
| 427136 | AL117415 | Hs.173716 | Homo sapiens mRNA; cDNA DKFZp434K0521 (f | 0.37 | 2.33 | downregulate stage |
| 427164 | AB037721 | Hs.173871 | KIAA1300 protein | 0.12 | 5.47 | downregulate stage |
| 427185 | AA398930 | Hs.186674 | ESTs | 0.22 | 4.65 | downregulate stage |
| 427373 | AB007972 | Hs.177533 | Homo sapiens mRNA; cDNA DKFZp586N0318 (f | 0.22 | 3.18 | downregulate stage |
| 427393 | AB029018 | Hs.177635 | KIAA1095 protein | 0.27 | 2.13 | downregulate stage |
| 427665 | AF134803 | Hs.180141 | cofilin 2 (muscle) | 0.05 | 4 | downregulate stage |
| 427676 | AA394062 | Hs.180266 | tropomyosin 2 (beta) | 0.45 | 1.87 | downregulate stage |
| 427888 | AA417088 | Hs.137598 | ESTs | 0.36 | 2.04 | downregulate stage |
| 427980 | AA418305 | | gb: zv96g05.s1 Soares_NhHMPu_S1 Home sapi | 0.32 | 2.39 | downregulate stage |
| 428087 | AA100573 | Hs.182421 | troponin C2, fast | 0.17 | 4.37 | downregulate stage |
| 428138 | AA773842 | Hs.293799 | ESTs | 0.45 | 2.2 | downregulate stage |
| 428221 | U96781 | Hs.183075 | ESTs, Highly similar to Ca2+ ATPase of f | 0.23 | 3.36 | downregulate stage |
| 428329 | AA426091 | Hs.98453 | ESTs | 0.21 | 2.09 | downregulate stage |
| 428409 | AW117207 | Hs.98523 | ESTs | 0.1 | 7.63 | downregulate stage |
| 428411 | AW291464 | Hs.10338 | ESTs | 0.32 | 1.98 | downregulate stage |
| 428648 | AF052728 | Hs.188021 | potassium voltage-gated channel, subfami | 0.08 | 2.99 | downregulate stage |
| 428649 | AL045716 | Hs.188228 | Homo sapiens cDNA FLJ11003 fis, clone PL | 0.11 | 2.07 | downregulate stage |
| 428899 | AA744610 | Hs.194431 | palladin | 0.42 | 1.84 | downregulate stage |
| 429350 | AI754634 | Hs.131987 | ESTs | 0.06 | 4.73 | downregulate stage |
| 429525 | N92540 | Hs.205353 | ectonucleoside triphosphate diphosphohyd | 0.18 | 2.31 | downregulate stage |
| 429545 | AI824164 | Hs.77667 | lymphocyte antigen 6 complex, locus E | 0.31 | 2.07 | downregulate stage |
| 429655 | U48959 | Hs.211582 | myosin, light polypeptide kinase | 0.33 | 2.18 | downregulate stage |
| 429892 | NM_003803 | Hs.2504 | myomesin 1 (skelemin) (185 kD) | 0.36 | 2.17 | downregulate stage |
| 429930 | AI580809 | Hs.99569 | ESTs | 0.18 | 5.6 | downregulate stage |
| 429956 | AI374651 | Hs.22542 | ESTs | 0.22 | 4.45 | downregulate stage |
| 430013 | AA463833 | Hs.151275 | ESTs | 0.21 | 3.03 | downregulate stage |
| 430271 | T06199 | Hs.237506 | heat shock cognate 40 | 0.47 | 1.85 | downregulate stage |
| 430310 | U60115 | Hs.239069 | four and a half LIM domains 1 | 0.18 | 3.44 | downregulate stage |
| 430418 | R98852 | Hs.36029 | heart and neural crest derivatives expre | 0.38 | 2.26 | downregulate stage |
| 430699 | AW969847 | Hs.292718 | ESTs, Weakly similar to RET2_HUMAN RETIN | 0.16 | 2.52 | downregulate stage |
| 430712 | AW044647 | Hs.196284 | ESTs | 0.29 | 1.94 | downregulate stage |
| 430778 | D90337 | Hs.247916 | natriuretic peptide precursor C | 0.14 | 4.48 | downregulate stage |
| 430998 | AF128847 | Hs.204038 | indolethylamine N-methyltransferase | 0.35 | 1.87 | downregulate stage |
| 432247 | AA531287 | Hs.105805 | ESTs | 0.21 | 3.99 | downregulate stage |
| 432689 | AB018320 | Hs.278626 | Arg/Abl-interacting protein ArgBP2 | 0.11 | 1.98 | downregulate stage |
| 432792 | AA448114 | Hs.278950 | protocadherin beta 1 | 0.22 | 2.93 | downregulate stage |
| 433142 | AL120697 | Hs.110640 | ESTs | 0.21 | 2.18 | downregulate stage |
| 433633 | AI880516 | Hs.84630 | ESTs | 0.34 | 2.67 | downregulate stage |
| 433688 | AA628467 | Hs.112572 | Homo sapiens cDNA FLJ14130 fis, clone MA | 0.35 | 2.27 | downregulate stage |
| 433826 | AA609938 | Hs.144492 | ESTs | 0.24 | 1.91 | downregulate stage |
| 434025 | AF114264 | Hs.216381 | Homo sapiens clone HH409 unknown mRNA | 0.07 | 3.46 | downregulate stage |
| 434160 | BE551196 | Hs.114275 | ESTs | 0.5 | 2 | downregulate stage |
| 434352 | AF129505 | Hs.86492 | small muscle protein, X-linked | 0.34 | 2.13 | downregulate stage |
| 434361 | AF129755 | Hs.117772 | ESTs | 0.03 | 31.3 | downregulate stage |
| 435731 | AA699581 | Hs.186811 | ESTs | 0.31 | 3.25 | downregulate stage |
| 435869 | AF255910 | Hs.54650 | vascular endothelial junction-associated | 0.21 | 3.73 | downregulate stage |
| 435978 | AF272899 | Hs.135118 | Homo sapiens PR-domain zinc finger prote | 0.35 | 2.25 | downregulate stage |
| 436359 | Z83806 | | gb: H. sapiens mRNA for axonemal dynein he | 0.24 | 3.28 | downregulate stage |
| 436638 | AI271945 | Hs.134984 | ESTs | 0.36 | 1.87 | downregulate stage |
| 436953 | AW959074 | Hs.23648 | Homo sapiens cDNA FLJ13097 fis, clone NT | 0.14 | 6.95 | downregulate stage |
| 437176 | AW176909 | Hs.42346 | calcineurin-binding protein calsarcin-1 | 0.32 | 2.19 | downregulate stage |
| 437233 | D81448 | Hs.153961 | ARP1 (actin-related protein 1, yeast) ho | 0.27 | 2.38 | downregulate stage |
| 438619 | AB032773 | Hs.6341 | TU12B1-TY protein | 0.19 | 2.69 | downregulate stage |
| 438666 | AW014493 | Hs.126727 | ESTs | 0.16 | 1.98 | downregulate stage |
| 439231 | AW581935 | Hs.141480 | ESTs | 0.1 | 3.9 | downregulate stage |
| 439973 | AI733308 | Hs.124663 | ESTs | 0.16 | 6.2 | downregulate stage |
| 440172 | AA868584 | Hs.126154 | ESTs | 0.24 | 2.34 | downregulate stage |
| 440274 | R24595 | Hs.7122 | scrapie responsive protein 1 | 0.11 | 3.02 | downregulate stage |
| 440687 | AL080222 | Hs.7358 | hypothetical protein FLJ13110 | 0.19 | 2.95 | downregulate stage |
| 440700 | AW952281 | Hs.296184 | ESTs, Highly similar to GB01_HUMAN GUANI | 0.13 | 2.69 | downregulate stage |
| 440737 | AI375167 | Hs.132221 | Homo sapiens cDNA FLJ12401 fis, clone MA | 0.5 | 2 | downregulate stage |
| 441805 | AA285136 | Hs.7974 | neuronal specific transcription factor D | 0.07 | 13.55 | downregulate stage |
| 441969 | AI733386 | Hs.129194 | ESTs, Weakly similar to ALU1_HUMAN ALU S | 0.38 | 1.86 | downregulate stage |
| 442109 | BE218975 | Hs.212395 | ESTs | 0.24 | 2.86 | downregulate stage |
| 442985 | AI025984 | Hs.55467 | ESTs | 0.19 | 2 | downregulate stage |
| 443060 | D78874 | Hs.8944 | procollagen C-endopeptidase enhancer 2 | 0.09 | 3.66 | downregulate stage |
| 443164 | AI038503 | Hs.55780 | ESTs, Weakly similar to ALU1_HUMAN ALU S | 0.2 | 1.86 | downregulate stage |
| 443476 | AW068594 | Hs.133878 | ESTs, Weakly similar to AF151889 1 CGI-1 | 0.11 | 2.79 | downregulate stage |
| 443604 | C03577 | Hs.9615 | myosin regulatory light chain 2, smooth | 0.24 | 3.41 | downregulate stage |
| 443790 | NM_003500 | Hs.9795 | acyl-Coenzyme A oxidase 2, branched chai | 0.28 | 3.6 | downregulate stage |
| 443932 | AW888222 | Hs.9973 | tensin | 0.32 | 2.57 | downregulate stage |
| 444195 | AB002351 | Hs.10587 | KIAA0353 protein | 0.19 | 4.04 | downregulate stage |
| 444484 | AK002126 | Hs.11260 | hypothetical protein FLJ11264 | 0.38 | 2.04 | downregulate stage |
| 444684 | AW044070 | Hs.147037 | ESTs | 0.36 | 2.25 | downregulate stage |
| 444793 | U89281 | Hs.11958 | oxidative 3 alpha hydroxysteroid dehydro | 0.29 | 2.19 | downregulate stage |
| 444938 | AW470690 | Hs.148814 | ESTs | 0.43 | 2.3 | downregulate stage |
| 445230 | U97018 | Hs.12451 | echinoderm microtubule-associated protei | 0.13 | 2.64 | downregulate stage |
| 445235 | AI564022 | Hs.138207 | ESTs | 0.13 | 2.4 | downregulate stage |
| 445621 | AI733818 | Hs.145549 | ESTs | 0.25 | 1.91 | downregulate stage |
| 445687 | W80382 | Hs.149297 | ESTs | 0.2 | 3.5 | downregulate stage |
| 445850 | AI262049 | Hs.145560 | ESTs | 0.53 | 1.9 | downregulate stage |
| 446406 | AI553681 | Hs.25248 | ESTs | 0.07 | 3.25 | downregulate stage |
| 446500 | U78093 | Hs.15154 | sushi-repeat-containing protein, X chrom | 0.33 | 1.9 | downregulate stage |
| 447595 | AW379130 | Hs.18953 | phosphodiesterase 9A | 0.28 | 1.85 | downregulate stage |
| 447918 | AI129320 | Hs.16930 | ESTs | 0.29 | 2.46 | downregulate stage |
| 448076 | AJ133123 | Hs.20196 | adenylate cyclase 9 | 0.2 | 2.27 | downregulate stage |
| 448283 | AI340462 | Hs.182979 | ribosomal protein L12 | 0.53 | 1.9 | downregulate stage |
| 448303 | BE622468 | Hs.11924 | ESTs, Weakly similar to ALU1_HUMAN ALU S | 0.39 | 1.84 | downregulate stage |
| 448425 | AI500359 | Hs.233401 | ESTs | 0.16 | 1.97 | downregulate stage |
| 448429 | D17408 | Hs.21223 | calponin 1, basic, smooth muscle | 0.12 | 5.43 | downregulate stage |
| 448555 | AI536697 | Hs.159863 | ESTs | 0.32 | 2.86 | downregulate stage |
| 448901 | AK001021 | Hs.22505 | hypothetical protein FLJ10159 | 0.17 | 2.66 | downregulate stage |
| 448999 | AF179274 | Hs.22791 | transmembrane protein with EGF-like and | 0.24 | 1.86 | downregulate stage |
| 449226 | AB002365 | Hs.23311 | KIAA0367 protein | 0.1 | 4.96 | downregulate stage |
| 449238 | AA428229 | Hs.85524 | muscle-specific RING-finger protein homo | 0.14 | 2.53 | downregulate stage |
| 449422 | AA001373 | Hs.59821 | ESTs | 0.43 | 2.3 | downregulate stage |
| 449690 | AA002140 | Hs.33024 | ESTs | 0.5 | 2 | downregulate stage |
| 449874 | AA135688 | Hs.10083 | ESTs | 0.33 | 2.7 | downregulate stage |
| 449925 | AI342493 | Hs.24192 | Homo sapiens cDNA FLJ20767 fis, clone CO | 0.11 | 5.57 | downregulate stage |
| 450300 | AL041440 | Hs.58210 | ESTs | 0.41 | 2.13 | downregulate stage |
| 450578 | AI971773 | Hs.232268 | ESTs | 0.44 | 2.25 | downregulate stage |
| 450810 | BE207588 | Hs.25511 | transforming growth factor beta 1 induce | 0.51 | 1.86 | downregulate stage |
| 450831 | R37974 | Hs.25255 | ESTs | 0.23 | 1.96 | downregulate stage |
| 451331 | AK002039 | Hs.26243 | Homo sapiens cDNA FLJ11177 fis, clone PL | 0.37 | 2.18 | downregulate stage |
| 451533 | NM_004657 | Hs.26530 | serum deprivation response (phosphatidyl | 0.1 | 9.36 | downregulate stage |
| 451782 | AF233588 | Hs.27018 | Ris | 0.35 | 2.43 | downregulate stage |
| 451948 | AW452473 | Hs.211125 | ESTs | 0.43 | 1.88 | downregulate stage |
| 452422 | AA521416 | Hs.22701 | ESTs | 0.41 | 1.85 | downregulate stage |
| 452463 | R36452 | Hs.300817 | ESTs | 0.09 | 4.05 | downregulate stage |
| 452776 | AA194540 | Hs.13522 | ESTs | 0.36 | 2.16 | downregulate stage |
| 452814 | AI092790 | Hs.55016 | hypothetical protein FLJ21935 | 0.06 | 4.7 | downregulate stage |
| 453064 | R40334 | Hs.301395 | Homo sapiens cDNA: FLJ21204 fis, clone C | 0.07 | 4.47 | downregulate stage |
| 453351 | AI625721 | Hs.61814 | Homo sapiens cDNA: FLJ22750 fis, clone K | 0.33 | 3.05 | downregulate stage |
| 453355 | AW295374 | Hs.31412 | Homo sapiens cDNA FLJ11422 fis, clone HE | 0.03 | 7.14 | downregulate stage |
| 453359 | AA448787 | Hs.24872 | ESTs, Weakly similar to aortic carboxype | 0.4 | 1.92 | downregulate stage |
| 453464 | AI884911 | Hs.32989 | receptor (calcitonin) activity modifying | 0.24 | 3.29 | downregulate stage |
| 453500 | AI478427 | Hs.43125 | ESTs | 0.02 | 11.41 | downregulate stage |
| 453582 | AW854339 | Hs.33476 | hypothetical protein FLJ11937 | 0.39 | 2.04 | downregulate stage |
| 453586 | AA248089 | Hs.50841 | ESTs, Weakly similar to tuftelin [M. musc | 0.43 | 1.86 | downregulate stage |
| 453666 | AW015681 | Hs.135229 | ESTs, Moderately similar to AF107203 1 a | 0.28 | 2.42 | downregulate stage |
| 453698 | AA037615 | Hs.42746 | ESTs | 0.2 | 1.88 | downregulate stage |
| 453702 | AA037637 | Hs.42128 | ESTs | 0.32 | 2.42 | downregulate stage |
| 453725 | W28543 | | gb: 48c5 Human retina cDNA randomly prime | 0.2 | 2.06 | downregulate stage |
| 453950 | AA156998 | Hs.211568 | eukaryotic translation initiation factor | 0.07 | 7.86 | downregulate stage |
| 454078 | AA601518 | Hs.22209 | secreted modular calcium-binding protein | 0.16 | 2.49 | downregulate stage |
| 454471 | AW902125 | | gb: QV0-NN1022-120500-220-h12 NN1022 Homo | 0.41 | 2.45 | downregulate stage |
| 454637 | AW811613 | | gb: CM3-ST0157-300999-017-f06 ST0157 Homo | 0.18 | 2.2 | downregulate stage |
| 454750 | AW866285 | | gb: QV4-SN0024-080400-167-a09 SN0024 Homo | 0.49 | 2.05 | downregulate stage |
| 455073 | AW854829 | | gb: QV2-CT0261-201099-011-f01 CT0261 Homo | 0.27 | 2.09 | downregulate stage |
| 455485 | AA102287 | Hs.26756 | Homo sapiens cDNA: FLJ20896 fis, clone A | 0.32 | 2.07 | downregulate stage |
| 455611 | L06419 | Hs.75093 | procollagen-lysine, 2-oxoglutarate 5-dio | 0.15 | 2.87 | downregulate stage |
| 456100 | AI983981 | Hs.189114 | ESTs | 0.4 | 2.5 | downregulate stage |
| 456841 | AA875863 | Hs.152345 | poliovirus receptor-related 1 (herpesvir | 0.35 | 1.9 | downregulate stage |
| 457064 | AA776743 | Hs.191589 | ESTs | 0.17 | 2.34 | downregulate stage |
| 457108 | N74724 | Hs.108479 | ESTs | 0.48 | 2.1 | downregulate stage |
| 457506 | AF131757 | Hs.274533 | Homo sapiens clone 24926 mRNA sequence | 0.29 | 2.59 | downregulate stage |
| 457625 | T10073 | | gb: seq1293 b4HB3MA Cot8-HAP-Ft Homo sapi | 0.29 | 3.45 | downregulate stage |
| 458482 | AV648858 | Hs.29488 | ESTs | 0.26 | 2.17 | downregulate stage |
| 458622 | AA972412 | Hs.13755 | f-box and WD-40 domain protein 2 | 0.51 | 1.95 | downregulate stage |
| 458841 | W28965 | | gb: 54d10 Human retina cDNA randomly prim | 0.32 | 3.1 | downregulate stage |
| 459037 | AW439497 | Hs.290656 | EST | 0.43 | 2.35 | downregulate stage |
| 400762 | | | | 0.71 | 0.4 | early stage |
| 400937 | | | | 1.2 | 0.26 | early stage |
| 400977 | | | | 0.63 | 0.48 | early stage |
| 401024 | | | | 0.8 | 0.3 | early stage |
| 401048 | | | | 1.9 | 0.22 | early stage |
| 401537 | | | | 1.3 | 0.2 | early stage |
| 401619 | | | | 3.5 | 0.19 | early stage |
| 402089 | | | | 0.39 | 0.55 | early stage |
| 402176 | | | | 0.35 | 0.91 | early stage |
| 402407 | | | | 1 | 0.15 | early stage |
| 402430 | | | | 0.28 | 1.25 | early stage |
| 402435 | | | | 2.15 | 0.21 | early stage |
| 402522 | | | | 1.8 | 0.14 | early stage |
| 402546 | | | | 0.17 | 1.66 | early stage |
| 402604 | | | | 0.41 | 0.66 | early stage |
| 402716 | | | | 0.14 | 0.86 | early stage |
| 402846 | | | | 0.61 | 0.52 | early stage |
| 402922 | | | | 0.14 | 0.83 | early stage |
| 403567 | | | | 0.44 | 0.49 | early stage |
| 403590 | | | | 1 | 0.34 | early stage |
| 404336 | | | | 0.49 | 0.44 | early stage |
| 404345 | AA730407 | Hs.159156 | protocadherin 11 | 0.38 | 0.4 | early stage |
| 404501 | AW247252 | Hs.75514 | nucleoside phosphorylase | 0.32 | 0.8 | early stage |
| 404594 | | | | 0.37 | 0.91 | early stage |
| 404874 | | | | 1.87 | 0.26 | early stage |
| 404881 | | | | 0.36 | 0.5 | early stage |
| 404896 | NM_000429 | Hs.106845 | methionine adenosyltransferase I, alpha | 1 | 0.36 | early stage |
| 404999 | U58196 | Hs.296281 | interleukin enhancer binding factor 1 | 0.19 | 1.06 | early stage |
| 405071 | | | | 0.19 | 0.77 | early stage |
| 405308 | | | | 0.4 | 0.55 | early stage |
| 405463 | | | | 0.41 | 1 | early stage |
| 405580 | | | | 1.89 | 0.19 | early stage |
| 405600 | | | | 0.22 | 0.63 | early stage |
| 405720 | | | | 0.37 | 0.61 | early stage |
| 405863 | | | | 0.53 | 0.26 | early stage |
| 405867 | | | | 0.24 | 1.1 | early stage |
| 405920 | | | | 0.39 | 1.15 | early stage |
| 406036 | | | | 2.15 | 0.17 | early stage |
| 406243 | | | | 0.32 | 1.23 | early stage |
| 406367 | | | | 0.38 | 0.76 | early stage |
| 406834 | AI318680 | | gb: ta49g09.x1 NCI_CGAP_Lu25 Homo sapiens | 0.4 | 0.67 | early stage |
| 406881 | D16154 | | gb: Human gene for cytochrome P-450c 11, e | 0.14 | 1.55 | early stage |
| 407411 | AF060170 | | gb: Homo sapiens AS12 protein mRNA, parti | 0.39 | 0.69 | early stage |
| 407639 | AW205369 | Hs.252936 | ESTs | 0.61 | 0.34 | early stage |
| 408112 | AW451982 | Hs.248613 | ESTs | 0.2 | 0.54 | early stage |
| 408732 | AL117490 | Hs.47225 | Homo sapiens mRNA; cDNA DKFZp434N211 (fr | 1 | 0.32 | early stage |
| 409103 | AF251237 | Hs.112208 | XAGE-1 protein | 0.33 | 1.03 | early stage |
| 409840 | AW502122 | | gb: UI-HF-BR0p-ajr-c-08-0-UI.r1 NIH_MGC_5 | 0.56 | 0.28 | early stage |
| 410128 | AW904599 | | gb: RC1-NN1063-260400-011-h05 NN1063 Homo | 1.26 | 0.37 | early stage |
| 411474 | AW848427 | | gb: IL3-CT0214-150200-075-H10 CT0214 Homo | 1 | 0.14 | early stage |
| 412564 | X83703 | Hs.74019 | cardiac ankyrin repeat protein | 0.36 | 0.44 | early stage |
| 413266 | BE300352 | | gb: 600944231F1 NIH_MGC_17 Homo sapiens c | 1.46 | 0.25 | early stage |
| 413341 | H78472 | Hs.191325 | ESTs, Weakly similar to cDNA EST yk414c9 | 0.41 | 0.48 | early stage |
| 414055 | AW818687 | Hs.5366 | Homo sapiens cDNA: FLJ21522 fis, clone C | 0.33 | 0.67 | early stage |
| 414170 | AA335996 | Hs.3743 | matrix metalloproteinase 24 (membrane-in | 1.15 | 0.21 | early stage |
| 414220 | BE298094 | | gb: 601118231F1 NIH_MGC_17 Homo sapiens c | 0.16 | 0.52 | early stage |
| 414276 | BE297862 | | gb: 601174780F1 NIH_MGC_17 Homo sapiens c | 1.75 | 0.2 | early stage |
| 414327 | BE408145 | Hs.185254 | ESTs, Moderately similar to NAC-1 protei | 0.1 | 0.99 | early stage |
| 414366 | BE549143 | | gb: 601076456F1 NIH_MGC_12 Homo sapiens c | 1 | 0.31 | early stage |
| 414376 | BE393856 | Hs.66915 | ESTs, Weakly similar to 16.7 Kd protein[ | 0.18 | 0.96 | early stage |
| 414555 | N98569 | Hs.76422 | phospholipase A2, group IIA (platelets, | 0.48 | 0.67 | early stage |
| 415199 | AA161125 | Hs.57893 | ESTs | 0.75 | 0.72 | early stage |
| 417304 | H15635 | | gb: ym27h06.r1 Soares infant brain 1NIB H | 0.6 | 0.58 | early stage |
| 417371 | N74613 | Hs.269149 | ESTs | 0.3 | 0.58 | early stage |
| 418133 | R43504 | Hs.6181 | ESTs | 1.28 | 0.29 | early stage |
| 419273 | BE271180 | Hs.293490 | ESTs | 0.54 | 0.28 | early stage |
| 419716 | AA953770 | | gb: on89e04.s1 Soares_NFL_T_GBC_S1 Homo s | 0.45 | 0.66 | early stage |
| 420390 | AA330047 | Hs.191187 | ESTs | 1.45 | 0.12 | early stage |
| 421745 | AF205849 | Hs.107740 | Kruppel-like factor 2 (lung) | 0.33 | 0.71 | early stage |
| 421813 | BE048255 | | gb: tz49b05.y1 NCI_CGAP_Brn52 Homo sapien | 0.52 | 0.67 | early stage |
| 422669 | H12402 | Hs.119122 | ribosomal protein L13a | 1 | 0.26 | early stage |
| 422743 | BE304678 | Hs.119598 | ribosomal protein L3 | 0.2 | 0.57 | early stage |
| 422760 | BE409561 | | gb: 601299865F1 NIH_MGC_21 Homo sapiens c | 0.41 | 0.64 | early stage |
| 422880 | AF228704 | Hs.121524 | glutathione reductase | 3.75 | 0.1 | early stage |
| 423457 | F08208 | Hs.155606 | paired mesoderm homeo box 1 | 0.55 | 0.54 | early stage |
| 425349 | AA425234 | Hs.79886 | ribose 5-phosphate isomerase A (ribose 5 | 1 | 0.21 | early stage |
| 425360 | BE547704 | | gb: 601076309F1 NIH_MGC_12 Homo sapiens c | 0.28 | 0.85 | early stage |
| 426356 | BE536836 | | gb: 601064837F1 NIH_MGC_10 Homo sapiens c | 0.31 | 0.69 | early stage |
| 426521 | AF161445 | Hs.170219 | hypothetical protein | 0.11 | 0.69 | early stage |
| 426670 | AA383047 | Hs.193718 | ESTs | 1 | 0.55 | early stage |
| 426699 | AA383337 | Hs.121269 | ESTs | 0.33 | 0.71 | early stage |
| 427827 | AA416577 | Hs.189105 | ESTs | 1.16 | 0.41 | early stage |
| 428651 | AF196478 | Hs.188401 | annexin A10 | 1.85 | 0.24 | early stage |
| 430727 | X75917 | Hs.2654 | MHC binding factor, beta | 0.78 | 0.46 | early stage |
| 430750 | AI650360 | Hs.100256 | ESTs | 2.15 | 0.17 | early stage |
| 430795 | AW971398 | | gb: EST383487 MAGE resequences, MAGL Homo | 1.95 | 0.21 | early stage |
| 431900 | AW972048 | Hs.192534 | ESTs | 0.36 | 0.73 | early stage |
| 432728 | NM_006979 | Hs.278721 | HLA class II region expressed gene KE4 | 1.8 | 0.17 | early stage |
| 432791 | NM_014554 | Hs.278949 | sentrin/SUMO-specific protease | 2.8 | 0.15 | early stage |
| 433404 | T32982 | Hs.102720 | ESTs | 2.2 | 0.13 | early stage |
| 433782 | AF090945 | | gb: Homo sapiens clone HQ0670 | 3.3 | 0.15 | early stage |
| 433877 | BE146567 | Hs.257475 | ESTs | 0.65 | 0.7 | early stage |
| 434483 | AA223646 | Hs.57222 | nurim (nuclear envelope membrane protein | 0.38 | 0.49 | early stage |
| 435752 | AF230801 | Hs.125180 | growth hormone receptor | 0.52 | 0.4 | early stage |
| 436178 | BE152396 | Hs.21590 | Homo sapiens HSPC304 mRNA, partial cds | 1.65 | 0.14 | early stage |
| 436391 | AJ227892 | Hs.146274 | ESTs | 1.35 | 0.16 | early stage |
| 436602 | AI793222 | Hs.166817 | ESTs | 0.17 | 1.46 | early stage |
| 436777 | AA731199 | Hs.293130 | ESTs | 1 | 0.2 | early stage |
| 436813 | AW975714 | Hs.129004 | ESTs | 0.19 | 1.45 | early stage |
| 436869 | NM_014867 | Hs.297661 | Homo sapiens YAC clone 377A1 unknown mRN | 0.96 | 0.2 | early stage |
| 437169 | AA309612 | Hs.118797 | ubiquitin-conjugating enzyme E2D 3 (homo | 0.07 | 1.8 | early stage |
| 438649 | AA813136 | Hs.143014 | ESTs | 1.38 | 0.19 | early stage |
| 438681 | AW384815 | Hs.149208 | KIAA1555 protein | 0.25 | 0.54 | early stage |
| 438802 | AA825976 | Hs.136954 | ESTs | 1.8 | 0.14 | early stage |
| 438887 | R68857 | Hs.265499 | ESTs | 1.05 | 0.32 | early stage |
| 440128 | AA962623 | Hs.189144 | ESTs, Weakly similar to NPT2_HUMAN RENAL | 1 | 0.19 | early stage |
| 440397 | AA884448 | Hs.157239 | ESTs | 0.59 | 0.38 | early stage |
| 440509 | BE410132 | Hs.134202 | ESTs, Weakly similar to B41182 collagen | 0.26 | 0.9 | early stage |
| 440605 | Z40094 | Hs.185698 | ESTs | 0.51 | 0.43 | early stage |
| 442238 | AW135374 | Hs.270949 | ESTs | 1 | 0.18 | early stage |
| 443258 | AF169301 | Hs.9098 | sulfate transporter 1 | 0.85 | 0.49 | early stage |
| 445739 | AW136354 | Hs.145303 | ESTs | 0.88 | 0.4 | early stage |
| 447306 | AI373163 | Hs.170333 | ESTs | 0.15 | 0.8 | early stage |
| 447346 | AI525135 | Hs.210507 | ESTs | 1.35 | 0.27 | early stage |
| 448265 | N46272 | Hs.26812 | ESTs | 0.47 | 0.26 | early stage |
| 448678 | AI560776 | Hs.199854 | ESTs | 0.19 | 0.68 | early stage |
| 448778 | AF074913 | | gb: Homo sapiens transcription factor Pax | 0.57 | 0.53 | early stage |
| 448871 | BE616709 | | gb: 601279937F1 NIH_MGC_39 Homo sapiens c | 0.26 | 0.94 | early stage |
| 449180 | AI633836 | Hs.195649 | ESTs | 0.46 | 0.45 | early stage |
| 449213 | BE616861 | | gb: 601279056F1 NIH_MGC_39 Homo sapiens c | 0.73 | 0.56 | early stage |
| 449231 | BE410360 | | gb: 601302340F1 NIH_MGC_21 Homo sapiens c | 0.27 | 0.76 | early stage |
| 449450 | AL039852 | Hs.256990 | ESTs, Moderately similar to ALU7_HUMAN A | 1 | 0.26 | early stage |
| 449815 | AI671000 | Hs.199739 | ESTs | 1.2 | 0.15 | early stage |
| 450972 | AW967906 | Hs.194617 | ESTs | 0.28 | 0.83 | early stage |
| 451236 | AI767406 | Hs.207026 | ESTs, Weakly similar B56205 transcrip | 0.35 | 0.77 | early stage |
| 451283 | H83979 | | gb: ys93d11.r1 Soares retina N2b5HR Homo | 1 | 0.23 | early stage |
| 451375 | AI792066 | Hs.283902 | Homo sapiens BAC clone RP11-481J13 from | 0.16 | 1.37 | early stage |
| 452530 | AI905518 | | gb: RC-BT091-210199-098 BT091 Homo sapien | 1.35 | 0.21 | early stage |
| 452550 | AA026735 | | gb: ze93d05.r1 Soares_fetal_heart_NbHH19W | 0.44 | 0.6 | early stage |
| 454121 | AW090524 | Hs.244967 | ESTs | 2.85 | 0.17 | early stage |
| 454554 | AW847505 | | gb: RC0-CT0210-280999-021-c10 CT0210 Homo | 0.36 | 0.5 | early stage |
| 454697 | AW813728 | Hs.15036 | ESTs, Highly similar to AF161358 1 HSPC0 | 0.43 | 0.6 | early stage |
| 454851 | AW835127 | | gb: RC4-LT0011-100100-012-c07 LT0011 Homo | 0.77 | 0.32 | early stage |
| 455040 | AW852286 | | gb: QV0-CT0225-100400-187-d08 CT0225 Homo | 0.26 | 0.52 | early stage |
| 455225 | AW996689 | | gb: QV3-BN0046-150400-151-g09 BN0046 Homo | 1.7 | 0.18 | early stage |
| 455970 | AI733857 | Hs.71483 | ESTs | 0.66 | 0.45 | early stage |
| 456235 | AA203637 | | gb: zx58b12.r1 Soares_fetal_liver_spleen_{—} | 0.64 | 0.43 | early stage |
| 456450 | AJ000098 | Hs.94210 | eyes absent (Drosophila) homolog 1 | 0.38 | 0.76 | early stage |
| 456526 | AA782222 | Hs.192008 | ESTs | 0.63 | 0.43 | early stage |
| 456855 | AF035528 | Hs.153863 | MAD (mothers against decapentaplegic, Dr | 0.49 | 0.46 | early stage |
| 456983 | AI081687 | Hs.170225 | thymopoietin | 0.27 | 0.75 | early stage |
| 457089 | AA416556 | Hs.98234 | ESTs | 0.34 | 0.48 | early stage |
| 458198 | AI286100 | Hs.192739 | ESTs | 0.47 | 0.48 | early stage |
| 458425 | AI084057 | Hs.301149 | ESTs | 0.4 | 0.37 | early stage |
| 458660 | AI299739 | Hs.99601 | Homo sapiens cDNA FLJ12553 fis, clone NT | 0.79 | 0.68 | early stage |
| 458703 | AW749121 | Hs.282901 | ESTs | 1 | 0.23 | early stage |
| 458767 | T97083 | Hs.148355 | ESTs | 1 | 0.17 | early stage |
| 459399 | BE407712 | | gb: 601299745F1 NIH_MGC_21 Homo sapiens c | 0.68 | 0.56 | early stage |
| 400860 | | | | 4.9 | 0.08 | late stage |
| 408190 | AB032963 | Hs.43577 | ATPase, Class I, type 8B, member 2 | 0.58 | 0.84 | late stage |
| 408558 | AW015759 | Hs.235709 | ESTs | 1.26 | 0.45 | late stage |
| 410077 | AF097645 | Hs.58570 | deleted in cancer 1; RNA helicase HDB/DI | 6.2 | 0.12 | late stage |
| 410295 | AA741357 | Hs.62041 | nidogen (enactin) | 0.77 | 0.86 | late stage |
| 410310 | J02931 | Hs.62192 | coagulation factor III (thromboplastin, | 1.45 | 0.27 | late stage |
| 410614 | AI091195 | Hs.65029 | growth arrest-specific 1 | 0.4 | 1.12 | late stage |
| 410867 | X63556 | Hs.750 | fibrillin 1 (Marfan syndrome) | 0.71 | 1.07 | late stage |
| 411573 | AB029000 | Hs.70823 | KIAA1077 protein | 3.64 | 0.19 | late stage |
| 412116 | AW402166 | Hs.784 | Epstein-Barr virus induced gene 2 (lymph | 5.18 | 0.13 | late stage |
| 412178 | AW898526 | | gb: RC6-NN0072-040500-011-E05 NN0072 Homo | 7.55 | 0.08 | late stage |
| 412429 | AV650262 | Hs.75765 | GRO2 oncogene | 3.37 | 0.15 | late stage |
| 412652 | AI801777 | Hs.6774 | ESTs | 0.49 | 1.24 | late stage |
| 412828 | AL133396 | Hs.74621 | prion protein (p27-30) (Creutzfeld-Jakob | 3.6 | 0.11 | late stage |
| 414020 | NM_002984 | Hs.75703 | small inducible cytokine A4 (homologous | 4.62 | 0.14 | late stage |
| 414183 | AW957446 | Hs.301711 | ESTs | 3.18 | 0.16 | late stage |
| 414359 | M62194 | Hs.75929 | cadherin 11, type 2, OB-cadherin (osteob | 0.81 | 0.73 | late stage |
| 414476 | AA301867 | Hs.76224 | EGF-containing fibulin-like extracellula | 0.37 | 0.99 | late stage |
| 414504 | AW069181 | Hs.293523 | ESTs, Weakly similar to transformation-r | 0.97 | 0.65 | late stage |
| 414812 | X72755 | Hs.77367 | monokine induced by gamma interferon | 3.84 | 0.1 | late stage |
| 415116 | AA160363 | Hs.269956 | ESTs | 7.45 | 0.07 | late stage |
| 415714 | NM_002290 | Hs.78672 | laminin, alpha 4 | 0.49 | 1.39 | late stage |
| 415822 | D59243 | | gb: HUM526E07B Clontech human placenta po | 8.15 | 0.09 | late stage |
| 415994 | NM_002923 | Hs.78944 | regulator of G-protein signalling 2, 24 k | 0.48 | 1.46 | late stage |
| 417059 | AL037672 | Hs.81071 | extracellular matrix protein 1 | 1.52 | 0.44 | late stage |
| 417259 | AW903838 | Hs.81800 | chondroitin sulfate proteoglycan 2 (vers | 2 | 0.39 | late stage |
| 417733 | AL048678 | Hs.82503 | syntaphilin | 0.2 | 2.67 | late stage |
| 417771 | AA804698 | Hs.82547 | retinoic acid receptor responder (tazaro | 4.56 | 0.12 | late stage |
| 417849 | AW291587 | Hs.82733 | nidogen 2 | 1.81 | 0.38 | late stage |
| 418005 | AI186220 | Hs.83164 | collagen, type XV, alpha 1 | 0.97 | 0.74 | late stage |
| 418283 | S79895 | Hs.83942 | cathepsin K (pycnodysostosis) | 1.21 | 0.56 | late stage |
| 418875 | W19971 | Hs.233459 | ESTs | 2.63 | 0.33 | late stage |
| 419490 | NM_006144 | Hs.90708 | granzyme A (granzyme 1, cytotoxic T-lymp | 7.65 | 0.07 | late stage |
| 419925 | AA159850 | Hs.93765 | lipoma HMGIC fusion partner | 0.91 | 0.82 | late stage |
| 420411 | AI581085 | Hs.24678 | ESTs | 7.3 | 0.1 | late stage |
| 420943 | AI718702 | Hs.105341 | ESTs | 7.05 | 0.07 | late stage |
| 421116 | T19132 | Hs.101850 | retinol-binding protein 1, cellular | 0.99 | 0.42 | late stage |
| 421684 | BE281591 | Hs.106768 | hypothetical protein FLJ10511 | 8.1 | 0.08 | late stage |
| 421786 | AI188653 | Hs.21351 | ESTs | 8.15 | 0.08 | late stage |
| 422414 | AW875237 | Hs.13701 | ESTs | 1.05 | 0.69 | late stage |
| 422550 | BE297626 | Hs.296049 | microfibrillar-associated protein 4 | 0.28 | 1.53 | late stage |
| 422790 | AA809875 | Hs.25933 | ESTs | 2.59 | 0.28 | late stage |
| 423057 | AW961597 | Hs.130816 | ESTs | 7.55 | 0.08 | late stage |
| 423720 | AL044191 | Hs.23388 | Homo sapiens cDNA: FLJ21310 fis, clone C | 1.24 | 0.61 | late stage |
| 423905 | AW579960 | Hs.135150 | lung type-I cell membrane-associated gly | 2.12 | 0.24 | late stage |
| 423915 | AF039018 | Hs.135281 | alpha-actinin-2-associated LIM protein | 0.29 | 2.45 | late stage |
| 423961 | D13666 | Hs.136348 | osteoblast specific factor 2 (fasciclin | 4.47 | 0.17 | late stage |
| 424247 | X14008 | Hs.234734 | lysozyme (renal amyloidosis) | 2.44 | 0.26 | late stage |
| 424839 | AA740632 | Hs.120850 | ESTs | 2.74 | 0.23 | late stage |
| 426780 | BE242284 | Hs.172199 | adenylate cyclase 7 | 8.55 | 0.09 | late stage |
| 426974 | AB002298 | Hs.173035 | KIAA0300 protein | 1.56 | 0.36 | late stage |
| 427055 | AI301740 | Hs.173381 | dihydropyrimidinase-like 2 | 0.72 | 1 | late stage |
| 427882 | AA640987 | Hs.193767 | ESTs | 2.25 | 0.29 | late stage |
| 428065 | AI634046 | Hs.157313 | ESTs | 6.19 | 0.1 | late stage |
| 428147 | AW629965 | Hs.234983 | ESTs | 8.42 | 0.08 | late stage |
| 428585 | AB007863 | Hs.185140 | KIAA0403 protein | 6.85 | 0.08 | late stage |
| 428825 | AI084336 | Hs.128783 | ESTs | 0.9 | 0.8 | late stage |
| 429490 | AI971131 | Hs.293684 | ESTs, Weakly similar to alternatively sp | 1.59 | 0.39 | late stage |
| 429500 | X78565 | Hs.289114 | hexabrachion (tenascin C, cytotactin) | 0.77 | 0.49 | late stage |
| 431103 | M57399 | Hs.44 | pleiotrophin (heparin binding growth fac | 0.92 | 0.3 | late stage |
| 431319 | AA873350 | | gb: oh64h02.s1 NCI_CGAP_Kid5 Homo sapiens | 1.36 | 0.44 | late stage |
| 431583 | AL042613 | Hs.262476 | S-adenosylmethionine decarboxylase 1 | 4.69 | 0.17 | late stage |
| 432314 | AA533447 | Hs.285173 | ESTs | 1.75 | 0.31 | late stage |
| 432331 | W37862 | Hs.274368 | Homo sapiens mRNA; cDNA DKFZp586I1524 (f | 0.35 | 1.58 | late stage |
| 432559 | AW452948 | Hs.257631 | ESTs | 1.37 | 0.49 | late stage |
| 433470 | AW960564 | Hs.3337 | transmembrane 4 superfamily member 1 | 2.58 | 0.24 | late stage |
| 433586 | T85301 | | gb: yd78d06.s1 Soares fetal liver spleen | 5.06 | 0.11 | late stage |
| 436428 | AW246900 | Hs.283712 | hypothetical protein | 8.25 | 0.09 | late stage |
| 436729 | BE621807 | Hs.3337 | transmembrane 4 superfamily member 1 | 1.6 | 0.26 | late stage |
| 438873 | AI302471 | Hs.124292 | Homo sapiens cDNA: FLJ23123 fis, clone L | 8.15 | 0.08 | late stage |
| 439584 | AA838114 | Hs.221612 | ESTs | 8.6 | 0.09 | late stage |
| 439653 | AW021103 | Hs.6631 | hypothetical protein FLJ20373 | 2.21 | 0.27 | late stage |
| 440524 | R71264 | Hs.16798 | ESTs | 3.44 | 0.21 | late stage |
| 440624 | AF017987 | Hs.7306 | secreted frizzled-related protein 1 | 0.42 | 0.63 | late stage |
| 441976 | AA428403 | Hs.106131 | ESTs | 8.5 | 0.09 | late stage |
| 442739 | NM_007274 | Hs.8679 | cytosolic acyl coenzyme A thioester hydr | 7.95 | 0.06 | late stage |
| 443852 | AI679966 | Hs.150603 | ESTs | 6.84 | 0.12 | late stage |
| 443896 | AI680242 | Hs.271687 | Homo sapiens cDNA FLJ13527 fis, clone PL | 7.95 | 0.08 | late stage |
| 444212 | AW503976 | Hs.10649 | basement membrane-induced gene | 2.31 | 0.28 | late stage |
| 444331 | AW193342 | Hs.24144 | ESTs | 0.32 | 1.64 | late stage |
| 445142 | AW978484 | Hs.93842 | Homo sapiens cDNA: FLJ22554 fis, clone H | 2.52 | 0.24 | late stage |
| 445701 | AF055581 | Hs.13131 | lymphocyte adaptor protein | 1.43 | 0.47 | late stage |
| 446584 | U53445 | Hs.15432 | downregulated in ovarian cancer 1 | 0.54 | 1.39 | late stage |
| 447526 | AL048753 | Hs.340 | small inducible cytokine A2 (monocyte ch | 1.43 | 0.43 | late stage |
| 447744 | AA313230 | Hs.19413 | S100 calcium-binding protein A12 (calgra | 1.35 | 0.26 | late stage |
| 447818 | W79940 | Hs.21906 | ESTs | 6.63 | 0.13 | late stage |
| 449567 | AI990790 | Hs.188614 | ESTs | 4.7 | 0.13 | late stage |
| 450455 | AL117424 | Hs.25035 | chloride intracellular channel 4 | 0.64 | 1.31 | late stage |
| 452239 | AW379378 | Hs.170121 | protein tyrosine phosphatase, receptor t | 0.59 | 1.18 | late stage |
| 452698 | NM_001295 | Hs.301921 | ESTs | 2.31 | 0.26 | late stage |
| 453212 | H15416 | Hs.21865 | ESTs | 2.51 | 0.26 | late stage |
| 455510 | AA422029 | Hs.143640 | ESTs, Weakly similar to hyperpolarizatio | 8.6 | 0.06 | late stage |
| 400775 | R58624 | Hs.2186 | eukaryotic translation elongation factor | 1 | 1 | T2-T4 grade 3 papilloma marker |
| 401508 | | | | 1 | 1 | T2-T4 grade 3 papilloma marker |
| 403092 | | | | 1 | 1 | T2-T4 grade 3 papilloma marker |
| 404232 | | | | 1 | 1 | T2-T4 grade 3 papilloma marker |
| 407020 | U49973 | | gb: Human Tigger1 transposable element, c | 1 | 1 | T2-T4 grade 3 papilloma marker |
| 407345 | AI053836 | Hs.169365 | ESTs, Weakly similar to ALU1_HUMAN ALU S | 1 | 1 | T2-T4 grade 3 papilloma marker |
| 407420 | AF084362 | | gb: Homo sapiens lipoate-protein ligase B | 1 | 1 | T2-T4 grade 3 papilloma marker |
| 407577 | AW131324 | Hs.246759 | ESTs, Weakly similar to KIAA1074 protein | 1 | 1 | T2-T4 grade 3 papilloma marker |
| 407666 | AF071107 | Hs.37501 | MAD (mothers against decapentaplegic, Dr | 1 | 1 | T2-T4 grade 3 papilloma marker |
| 407916 | L09234 | Hs.603 | ATPase, H+ transporting, lysosomal (vacu | 1 | 1 | T2-T4 grade 3 papilloma marker |
| 407936 | AW118147 | Hs.270935 | ESTs | 1 | 1 | T2-T4 grade 3 papilloma marker |
| 408186 | AW168847 | Hs.250156 | ESTs | 1 | 1 | T2-T4 grade 3 papilloma marker |
| 408950 | AA707814 | Hs.7396 | ESTs | 1 | 1 | T2-T4 grade 3 papilloma marker |
| 409038 | T97490 | Hs.50002 | small inducible cytokine subfamily A (Cy | 1.2 | 0.12 | T2-T4 grade 3 papilloma marker |
| 409045 | AA635062 | Hs.50094 | Homo sapiens mRNA; cDNA DKFZp434O0515 (f | 1 | 1 | T2-T4 grade 3 papilloma marker |
| 409196 | NM_001874 | Hs.169765 | carboxypeptidase M | 1 | 1 | T2-T4 grade 3 papilloma marker |
| 409281 | AA069998 | | gb: zm67b03.r1 Stratagene neuroepithelium | 1 | 1 | T2-T4 grade 3 papilloma marker |
| 410010 | AW572853 | Hs.257683 | ESTs, Weakly similar to ALU3_HUMAN ALU S | 1 | 0.5 | T2-T4 grade 3 papilloma marker |
| 410157 | AW593277 | Hs.225056 | ESTs | 1 | 0.69 | T2-T4 grade 3 papilloma marker |
| 411112 | AW818158 | | gb: CM1-ST0277-161299-070-g07 ST0277 Homo | 1 | 1 | T2-T4 grade 3 papilloma marker |
| 411336 | AW837675 | | gb: QV2-LT0039-260300-107-b04 LT0039 Homo | 1 | 1 | T2-T4 grade 3 papilloma marker |
| 412051 | T15872 | Hs.268713 | ESTs, Weakly similar to hypothetical pro | 1 | 1 | T2-T4 grade 3 papilloma marker |
| 413485 | N52628 | | gb: yv37g11.s1 Soares fetal liver spleen | 1 | 1 | T2-T4 grade 3 papilloma marker |
| 413574 | BE149158 | Hs.129998 | Homo sapiens cDNA FLJ14267 fis, clone PL | 1 | 1 | T2-T4 grade 3 papilloma marker |
| 413782 | BE546104 | | gb: 601072642F1 NIH_MGC_12 Homo sapiens c | 1 | 1 | T2-T4 grade 3 papilloma marker |
| 414749 | H94622 | Hs.193358 | ESTs, Moderately similar to diabetes mel | 1 | 1 | T2-T4 grade 3 papilloma marker |
| 415293 | R49462 | Hs.106541 | ESTs | 1 | 1 | T2-T4 grade 3 papilloma marker |
| 415442 | F12963 | Hs.7045 | GL004 protein | 1 | 1 | T2-T4 grade 3 papilloma marker |
| 416255 | T87587 | Hs.272082 | ESTs | 1 | 1 | T2-T4 grade 3 papilloma marker |
| 417047 | AA192640 | Hs.1526 | ATPase, Ca++ transporting, cardiac muscl | 1 | 1 | T2-T4 grade 3 papilloma marker |
| 417181 | L10123 | Hs.1071 | surfactant protein A binding protein | 1 | 1 | T2-T4 grade 3 papilloma marker |
| 417367 | N73877 | Hs.171815 | ESTs | 1 | 1 | T2-T4 grade 3 papilloma marker |
| 419721 | NM_001650 | Hs.288650 | aquaporin 4 | 1 | 1 | T2-T4 grade 3 papilloma marker |
| 420294 | AA808259 | Hs.196716 | ESTs | 1 | 0.65 | T2-T4 grade 3 papilloma marker |
| 423589 | AA328082 | Hs.209569 | ESTs, Weakly similar to thrombospondin t | 1 | 1 | T2-T4 grade 3 papilloma marker |
| 424549 | AI873205 | Hs.183114 | Homo sapiens cDNA FLJ14236 fis, clone NT | 1 | 1 | T2-T4 grade 3 papilloma marker |
| 425458 | H89317 | Hs.182889 | ESTs | 1 | 1 | T2-T4 grade 3 papilloma marker |
| 426475 | AL134728 | | gb: DKFZp547A1890_r1 547 (synonym: hfbr1) | 1 | 1 | T2-T4 grade 3 papilloma marker |
| 429453 | AA453195 | Hs.124222 | ESTs | 1 | 1 | T2-T4 grade 3 papilloma marker |
| 431200 | AF044923 | Hs.250752 | hook1 protein | 1 | 1 | T2-T4 grade 3 papilloma marker |
| 431938 | AA938471 | Hs.115242 | developmentally regulated GTP-binding pr | 1 | 1 | T2-T4 grade 3 papilloma marker |
| 431944 | AI360891 | Hs.143619 | ESTs | 1 | 1 | T2-T4 grade 3 papilloma marker |
| 432021 | AA524470 | Hs.58753 | ESTs | 1 | 1 | T2-T4 grade 3 papilloma marker |
| 432205 | AI806583 | Hs.125291 | ESTs | 1 | 0.31 | T2-T4 grade 3 papilloma marker |
| 432527 | AW975028 | Hs.102754 | ESTs | 1 | 1 | T2-T4 grade 3 papilloma marker |
| 434069 | AF116651 | Hs.283058 | hypothetical protein PRO0800 | 1 | 0.41 | T2-T4 grade 3 papilloma marker |
| 435278 | AW994242 | Hs.173495 | ESTs | 1 | 1 | T2-T4 grade 3 papilloma marker |
| 435965 | AI034368 | Hs.132650 | ESTs | 1 | 0.36 | T2-T4 grade 3 papilloma marker |
| 436227 | AA706937 | Hs.120802 | ESTs, Moderately similar to A26641 Na+/K | 1 | 1 | T2-T4 grade 3 papilloma marker |
| 436635 | AW104325 | Hs.272093 | ESTs, Weakly similar to STK2_HUMAN SERIN | 1 | 0.74 | T2-T4 grade 3 papilloma marker |
| 436640 | AA724411 | Hs.156065 | ESTs | 1 | 1 | T2-T4 grade 3 papilloma marker |
| 436884 | BE046657 | | gb: hn42e02.x1 NCI_CGAP_RDF2 Homo sapiens | 1 | 1 | T2-T4 grade 3 papilloma marker |
| 437251 | AW976082 | | gb: EST388191 MAGE resequences, MAGN Homo | 1 | 1 | T2-T4 grade 3 papilloma marker |
| 437348 | AA749149 | Hs.163114 | ESTs | 1 | 1 | T2-T4 grade 3 papilloma marker |
| 437769 | AA767853 | Hs.122895 | ESTs | 1 | 1 | T2-T4 grade 3 papilloma marker |
| 437771 | AA811071 | Hs.123349 | ESTs | 1 | 1 | T2-T4 grade 3 papilloma marker |
| 438347 | AA909686 | Hs.293397 | ESTs | 1 | 1 | T2-T4 grade 3 papilloma marker |
| 439171 | AA831133 | Hs.294128 | ESTs | 1 | 0.95 | T2-T4 grade 3 papilloma marker |
| 439914 | AA854066 | Hs.145394 | ESTs | 1 | 1 | T2-T4 grade 3 papilloma marker |
| 440399 | AI215527 | Hs.125589 | ESTs | 1 | 1 | T2-T4 grade 3 papilloma marker |
| 440972 | BE044588 | Hs.276158 | ESTs | 1 | 1 | T2-T4 grade 3 papilloma marker |
| 442004 | AA973568 | Hs.128317 | ESTs | 1 | 1 | T2-T4 grade 3 papilloma marker |
| 442270 | BE565699 | Hs.62005 | ESTs | 1 | 1 | T2-T4 grade 3 papilloma marker |
| 443413 | AI056457 | Hs.221642 | ESTs | 1 | 1 | T2-T4 grade 3 papilloma marker |
| 443927 | AW016726 | Hs.134860 | ESTs | 1 | 1 | T2-T4 grade 3 papilloma marker |
| 445442 | N20392 | Hs.42846 | ESTs | 1 | 1 | T2-T4 grade 3 papilloma marker |
| 445611 | AW418497 | Hs.145583 | ESTs | 1 | 0.49 | T2-T4 grade 3 papilloma marker |
| 445888 | AF070564 | Hs.13415 | Homo sapiens clone 24571 mRNA sequence | 1 | 1 | T2-T4 grade 3 papilloma marker |
| 446552 | AW470827 | Hs.156241 | ESTs | 1 | 1 | T2-T4 grade 3 papilloma marker |
| 447399 | AI815401 | Hs.251967 | Homo sapiens clone 785627 unknown mRNA | 2.9 | 0.14 | T2-T4 grade 3 papilloma marker |
| 449111 | T83109 | Hs.196180 | ESTs | 1 | 1 | T2-T4 grade 3 papilloma marker |
| 449232 | AW192780 | Hs.196080 | ESTs | 1 | 0.8 | T2-T4 grade 3 papilloma marker |
| 451373 | AI792030 | | gb: os03e11.y5 NCI_CGAP_Lu5 Homo sapiens | 1 | 1 | T2-T4 grade 3 papilloma marker |
| 452453 | AI902519 | | gb: QV-BT009-101198-051 BT009 Homo sapien | 1 | 1 | T2-T4 grade 3 papilloma marker |
| 452534 | AW083022 | Hs.149425 | Homo sapiens cDNA FLJ11980 fis, clone HE | 1 | 0.67 | T2-T4 grade 3 papilloma marker |
| 452536 | BE063380 | | gb: PM0-BT0275-291099-002-g 10 BT0275 Homo | 1.65 | 0.26 | T2-T4 grade 3 papilloma marker |
| 452640 | AA027115 | Hs.100206 | ESTs, Weakly similar to AAAD_HUMAN ARYLA | 1 | 1 | T2-T4 grade 3 papilloma marker |
| 452645 | AI911325 | Hs.212049 | EST | 1 | 1 | T2-T4 grade 3 papilloma marker |
| 453102 | NM_007197 | Hs.31664 | frizzled (Drosophila) homolog 10 | 1 | 1 | T2-T4 grade 3 papilloma marker |
| 453472 | AL037925 | | gb: DKFZp564M037_r1 564 (synonym: hfbr2) | 1 | 0.8 | T2-T4 grade 3 papilloma marker |
| 453609 | AL045301 | Hs.13427 | ESTs | 1 | 1 | T2-T4 grade 3 papilloma marker |
| 453677 | AL079389 | | gb: DKFZp434E2116_r1 434 (synonym: htes3) | 1 | 0.77 | T2-T4 grade 3 papilloma marker |
| 453704 | R41806 | Hs.100884 | ESTs | 1 | 1 | T2-T4 grade 3 papilloma marker |
| 455267 | AW880861 | | gb: QV0-OT0033-070300-152-c12 OT0033 Homo | 1 | 1 | T2-T4 grade 3 papilloma marker |
| 455880 | BE153208 | | gb: PM0-HT0335-050400-007-F10 HT0335 Homo | 1 | 1 | T2-T4 grade 3 papilloma marker |
| 456520 | AW835416 | Hs.29417 | HCF-binding transcription factor Zhangfe | 1 | 1 | T2-T4 grade 3 papilloma marker |
| 456763 | AJ271351 | Hs.128180 | B-cell translocation gene 4 | 1 | 0.71 | T2-T4 grade 3 papilloma marker |
| 456912 | AI458843 | Hs.158112 | protein tyrosine phosphatase, receptor t | 1 | 1 | T2-T4 grade 3 papilloma marker |
| 457018 | AA761820 | Hs.250965 | ESTs | 1 | 1 | T2-T4 grade 3 papilloma marker |
| 457323 | AW967813 | Hs.201064 | ESTs | 1 | 1 | T2-T4 grade 3 papilloma marker |
| 457339 | AW971949 | Hs.291252 | ESTs | 1 | 1 | T2-T4 grade 3 papilloma marker |
| 457340 | AA492071 | | gb: ne97b04.s1 NCI_CGAP_Kid1 Homo sapiens | 1 | 1 | T2-T4 grade 3 papilloma marker |
| 457507 | AW300248 | Hs.181693 | ESTs | 1 | 1 | T2-T4 grade 3 papilloma marker |
| 458106 | AF086561 | Hs.37 | acetyl-Coenzyme A acetyltransferase 1 (a | 1 | 1 | T2-T4 grade 3 papilloma marker |
| 458624 | AI362790 | Hs.181801 | ESTs | 1 | 0.34 | T2-T4 grade 3 papilloma marker |
| 459396 | AI907536 | Hs.103869 | ESTs | 1 | 1 | T2-T4 grade 3 papilloma marker |
| 401002 | | | | 1 | 1 | T2-T4 grade 3 solid tumor marker |
| 401866 | | | | 1.35 | 0.14 | T2-T4 grade 3 solid tumor marker |
| 403615 | | | | 1 | 1 | T2-T4 grade 3 solid tumor marker |
| 403776 | | | | 1 | 1 | T2-T4 grade 3 solid tumor marker |
| 404113 | | | | 1 | 0.43 | T2-T4 grade 3 solid tumor marker |
| 404488 | | | | 1 | 0.17 | T2-T4 grade 3 solid tumor marker |
| 404653 | | | | 1 | 1 | T2-T4 grade 3 solid tumor marker |
| 406076 | AL390179 | Hs.137011 | Homo sapiens mRNA; cDNA DKFZp547P134 (fr | 1 | 0.24 | T2-T4 grade 3 solid tumor marker |
| 406471 | | | | 1 | 0.42 | T2-T4 grade 3 solid tumor marker |
| 406690 | M29540 | Hs.220529 | carcinoembryonic antigen-related cell ad | 2.75 | 0.05 | T2-T4 grade 3 solid tumor marker |
| 407624 | AW157431 | Hs.248941 | ESTs | 3.05 | 0.15 | T2-T4 grade 3 solid tumor marker |
| 409153 | W03754 | Hs.50813 | hypothetical protein FLJ20022 | 3.85 | 0.03 | T2-T4 grade 3 solid tumor marker |
| 409464 | X69115 | Hs.54488 | zinc finger protein 37a (KOX 21) | 1.15 | 0.29 | T2-T4 grade 3 solid tumor marker |
| 409731 | AA125985 | Hs.56145 | thymosin, beta, identified in neuroblast | 1 | 0.24 | T2-T4 grade 3 solid tumor marker |
| 410025 | BE220489 | Hs.113592 | ESTs | 1 | 0.3 | T2-T4 grade 3 solid tumor marker |
| 410589 | AW770768 | Hs.266717 | ESTs | 1 | 0.28 | T2-T4 grade 3 solid tumor marker |
| 411840 | AW866330 | | gb: QV4-SN0024-080400-167-e01 SN0024 Homo | 1.05 | 0.15 | T2-T4 grade 3 solid tumor marker |
| 412198 | AA937111 | Hs.69165 | ESTs | 1 | 0.26 | T2-T4 grade 3 solid tumor marker |
| 412305 | AW936369 | | gb: QV4-DT0021-301299-071-d07 DT0021 Homo | 1 | 0.53 | T2-T4 grade 3 solid tumor marker |
| 412753 | AI065016 | Hs.6390 | ESTs | 1 | 0.33 | T2-T4 grade 3 solid tumor marker |
| 413472 | BE242870 | Hs.75379 | solute carrier family 1 (glial high affi | 1 | 0.69 | T2-T4 grade 3 solid tumor marker |
| 413530 | AA130158 | Hs.19977 | ESTs, Moderately similar to ALU8_HUMAN A | 1 | 0.29 | T2-T4 grade 3 solid tumor marker |
| 415027 | D31010 | | gb: HUML 12147 Human fetal lung Homo sapie | 1 | 1 | T2-T4 grade 3 solid tumor marker |
| 416099 | H18626 | Hs.22634 | ESTs | 1 | 0.74 | T2-T4 grade 3 solid tumor marker |
| 416655 | AW968613 | Hs.79428 | BCL2/adenovirus E1B 19 kD-interacting pro | 3.8 | 0.12 | T2-T4 grade 3 solid tumor marker |
| 418329 | AW247430 | Hs.84152 | cystathionine-beta-synthase | 2.85 | 0.08 | T2-T4 grade 3 solid tumor marker |
| 420347 | AL033539 | Hs.97124 | Human DNA sequence from clone RP1-309H15 | 1 | 0.2 | T2-T4 grade 3 solid tumor marker |
| 421243 | AW873803 | Hs.102876 | pancreatic lipase | 1 | 0.38 | T2-T4 grade 3 solid tumor marker |
| 422660 | AW297582 | Hs.237062 | ESTs | 1.05 | 0.32 | T2-T4 grade 3 solid tumor marker |
| 422834 | AA318334 | | gb: EST20402 Retina II Homo sapiens cDNA | 1 | 0.38 | T2-T4 grade 3 solid tumor marker |
| 422972 | N59319 | Hs.145404 | ESTs | 1 | 0.61 | T2-T4 grade 3 solid tumor marker |
| 423104 | AJ005273 | Hs.123647 | antigenic determinant of recA protein (m | 2.95 | 0.12 | T2-T4 grade 3 solid tumor marker |
| 423634 | AW959908 | Hs.1690 | heparin-binding growth factor binding pr | 1 | 0.05 | T2-T4 grade 3 solid tumor marker |
| 424268 | AA397653 | Hs.144339 | Human DNA sequence from clone 495O10 on | 1 | 0.35 | T2-T4 grade 3 solid tumor marker |
| 425196 | AL037915 | Hs.155097 | carbonic anhydrase II | 2.75 | 0.05 | T2-T4 grade 3 solid tumor marker |
| 427099 | AB032953 | Hs.173560 | odd Oz/ten-m homolog 2 (Drosophila, mous | 1 | 0.09 | T2-T4 grade 3 solid tumor marker |
| 430300 | U60805 | Hs.238648 | oncostatin M receptor | 1 | 0.25 | T2-T4 grade 3 solid tumor marker |
| 431098 | AW501465 | Hs.249230 | ribonuclease L (2′,5′-oligoisoadenylate | 1 | 0.28 | T2-T4 grade 3 solid tumor marker |
| 431277 | AA501806 | Hs.249965 | ESTs | 1 | 0.22 | T2-T4 grade 3 solid tumor marker |
| 431750 | AA514986 | Hs.283705 | ESTs | 1 | 1 | T2-T4 grade 3 solid tumor marker |
| 434273 | AA913143 | Hs.26303 | ESTs | 1 | 0.41 | T2-T4 grade 3 solid tumor marker |
| 435505 | AF200492 | Hs.211238 | interleukin-1 homolog 1 | 1.8 | 0.19 | T2-T4 grade 3 solid tumor marker |
| 436281 | AW411194 | Hs.120051 | ESTs | 2.05 | 0.14 | T2-T4 grade 3 solid tumor marker |
| 437010 | AA741368 | Hs.291434 | ESTs | 2.4 | 0.17 | T2-T4 grade 3 solid tumor marker |
| 437814 | AI088192 | Hs.135474 | ESTs, Weakly similar to DDX9_HUMAN ATP-D | 1.8 | 0.13 | T2-T4 grade 3 solid tumor marker |
| 438361 | AA805666 | Hs.146217 | Homo sapiens cDNA: FLJ23077 fis, clone L | 1 | 0.3 | T2-T4 grade 3 solid tumor marker |
| 438376 | BE541211 | Hs.34804 | Homo sapiens cDNA FLJ11472 fis, clone HE | 1 | 0.57 | T2-T4 grade 3 solid tumor marker |
| 439370 | AW274369 | Hs.158853 | ESTs | 1 | 0.17 | T2-T4 grade 3 solid tumor marker |
| 440021 | AW025498 | Hs.270842 | ESTs, Weakly similar to ALU8_HUMAN ALU S | 1 | 0.65 | T2-T4 grade 3 solid tumor marker |
| 440404 | AI015881 | Hs.125616 | ESTs | 1 | 0.26 | T2-T4 grade 3 solid tumor marker |
| 441523 | AW514263 | Hs.168872 | ESTs, Weakly similar to ALUF_HUMAN !!!! | 1 | 1 | T2-T4 grade 3 solid tumor marker |
| 442277 | AW448914 | Hs.202391 | ESTs | 2.4 | 0.15 | T2-T4 grade 3 solid tumor marker |
| 442738 | AW002370 | Hs.1 31055 | ESTs | 1 | 0.29 | T2-T4 grade 3 solid tumor marker |
| 443297 | AI049864 | Hs.133029 | ESTs | 1 | 1 | T2-T4 grade 3 solid tumor marker |
| 444754 | T83911 | Hs.11881 | transmembrane 4 superfamily member 4 | 1 | 0.61 | T2-T4 grade 3 solid tumor marker |
| 445550 | AI242754 | Hs.137306 | ESTs | 1 | 0.5 | T2-T4 grade 3 solid tumor marker |
| 446149 | BE242960 | Hs.203181 | ESTs | 1 | 0.25 | T2-T4 grade 3 solid tumor marker |
| 446163 | AA026880 | Hs.25252 | Homo sapiens cDNA FLJ13603 fis, clone PL | 1 | 0.21 | T2-T4 grade 3 solid tumor marker |
| 446434 | AI823410 | Hs.169149 | karyopherin alpha 1 (importin alpha 5) | 1 | 1 | T2-T4 grade 3 solid tumor marker |
| 446928 | AI694493 | Hs.246916 | ESTs | 1 | 0.31 | T2-T4 grade 3 solid tumor marker |
| 448591 | AI540111 | Hs.171261 | ESTs | 1 | 1 | T2-T4 grade 3 solid tumor marker |
| 449121 | AI915858 | Hs.194980 | ESTs | 1 | 1 | T2-T4 grade 3 solid tumor marker |
| 449539 | W80363 | Hs.58446 | ESTs | 1 | 0.33 | T2-T4 grade 3 solid tumor marker |
| 450451 | AW591528 | Hs.202072 | ESTs | 1 | 0.59 | T2-T4 grade 3 solid tumor marker |
| 450469 | AI955049 | Hs.281326 | ESTs | 1 | 0.43 | T2-T4 grade 3 solid tumor marker |
| 450684 | AA872605 | Hs.25333 | interleukin 1 receptor, type II | 1 | 0.05 | T2-T4 grade 3 solid tumor marker |
| 451099 | R52795 | Hs.25954 | interleukin 13 receptor, alpha 2 | 1.55 | 0.11 | T2-T4 grade 3 solid tumor marker |
| 451106 | BE382701 | Hs.25960 | v-myc avian myelocytomatosis viral relat | 1 | 0.95 | T2-T4 grade 3 solid tumor marker |
| 451130 | AI762250 | Hs.211347 | ESTs | 3.65 | 0.15 | T2-T4 grade 3 solid tumor marker |
| 451412 | AW136378 | Hs.208060 | ESTs | 1 | 1 | T2-T4 grade 3 solid tumor marker |
| 451806 | NM_003729 | Hs.27076 | RNA 3′-terminal phosphate cyclase | 1.35 | 0.22 | T2-T4 grade 3 solid tumor marker |
| 452114 | N22687 | Hs.8236 | ESTs | 1 | 0.19 | T2-T4 grade 3 solid tumor marker |
| 452743 | AW965082 | Hs.61455 | ESTs | 1 | 0.44 | T2-T4 grade 3 solid tumor marker |
| 454622 | U70071 | | gb: HSU70071 Human Homo sapiens cDNA clon | 1 | 1 | T2-T4 grade 3 solid tumor marker |
| 455235 | AW875951 | | gb: CM1-PT0013-131299-067-f09 PT0013 Homo | 1 | 0.31 | T2-T4 grade 3 solid tumor marker |
| 457792 | AL046988 | Hs.268677 | ESTs, Moderately similar to ALU7_HUMAN A | 1 | 0.24 | T2-T4 grade 3 solid tumor marker |
| 100147 | D13666 | Hs.136348 | osteoblast specific factor 2 (fasciclin | 20.531 | 0.036 | upregulate stage |
| 101193 | L20861 | Hs.152213 | “wingless-type MMTV integration site fam | 1 | 0.526 | upregulate stage |
| 101724 | M69225 | Hs.620 | bullous pemphigoid antigen 1 (230/240 kD) | 20.67 | 0.037 | upregulate stage |
| 101809 | M86849 | “Hs.323733 | “gap junction protein, beta 2, 26 kD (con | 20.78 | 0.019 | upregulate stage |
| 102154 | U17760 | Hs.75517 | “laminin, beta 3 (nicein (125 kD), kalini | 18.848 | 0.042 | upregulate stage |
| 102211 | U23070 | Hs.78776 | putative transmembrane protein | 2.092 | 0.28 | upregulate stage |
| 102623 | U66083 | Hs.37110 | “melanoma antigen, family A, 9” | 1 | 0.306 | upregulate stage |
| 102915 | X07820 | Hs.2258 | matrix metalloproteinase 10 (stromelysin | 3.27 | 0.041 | upregulate stage |
| 103036 | X54925 | “Hs.83169 | matrix metalloproteinase 1 (interstitial | 13.63 | 0.034 | upregulate stage |
| 103119 | X63629 | Hs.2877 | “cadherin 3, type 1, P-cadherin (placent | 7.296 | 0.054 | upregulate stage |
| 103312 | X82693 | Hs.3185 | “lymphocyte antigen 6 complex, locus D” | 0.908 | 0.485 | upregulate stage |
| 103478 | Y07755 | Hs.38991 | S100 calcium-binding protein A2 | 2.928 | 0.219 | upregulate stage |
| 103587 | Z29083 | Hs.82128 | 5T4 oncofetal trophoblast glycoprotein | 3.156 | 0.16 | upregulate stage |
| 106632 | AA459897 | Hs.11950 | GPI-anchored metastasis-associated prote | 1.642 | 0.516 | upregulate stage |
| 107151 | AA621169 | Hs.8687 | ESTs | 2.421 | 0.174 | upregulate stage |
| 107901 | AA026418 | “Hs.111758 | keratin 6A | 1.259 | 0.343 | upregulate stage |
| 107922 | AA028028 | Hs.61460 | “Homo sapiens Ig superfamily receptor LN | 14.22 | 0.049 | upregulate stage |
| 109166 | AA179845 | Hs.73625 | “RAB6 interacting, kinesin like (rabkine | 11.13 | 0.039 | upregulate stage |
| 109424 | AA227919 | “Hs.85962 | hyaluronan synthase 3 | 1.737 | 0.518 | upregulate stage |
| 110906 | N39584 | Hs.17404 | ESTs | 20.93 | 0.021 | upregulate stage |
| 112244 | R51309 | Hs.70823 | KIAA1077 protein | 3.941 | 0.181 | upregulate stage |
| 115060 | AA253214 | Hs.198249 | “gap junction protein, beta 5 (connexin | 1.932 | 0.502 | upregulate stage |
| 115697 | AA411502 | Hs.63325 | “transmembrane protease, serine 4” | 7.394 | 0.101 | upregulate stage |
| 115978 | AA447522 | “Hs.69517 | “Homo sapiens, clone MGC: 5257, mRNA, com | 1.667 | 0.445 | upregulate stage |
| 116335 | AA495830 | Hs.41690 | desmocollin 3 | 4.899 | 0.154 | upregulate stage |
| 118314 | N63402 | Hs.46692 | ESTs | 9.75 | 0.069 | upregulate stage |
| 118336 | N63604 | Hs.47166 | HT021 | 4.601 | 0.197 | upregulate stage |
| 119845 | W79920 | Hs.58561 | G protein-coupled receptor 87 | 1.95 | 0.123 | upregulate stage |
| 120486 | AA253400 | Hs.137569 | tumor protein 63 kDa with strong homolog | 4.191 | 0.211 | upregulate stage |
| 121027 | AA398470 | Hs.99785 | “Homo sapiens cDNA: FLJ21245 fis, clone | 14.25 | 0.058 | upregulate stage |
| 124059 | F13673 | Hs.283713 | “ESTs, Weakly similar to ORF YGL050w [S. | 4.99 | 0.168 | upregulate stage |
| 128595 | U31875 | “Hs.152677 | “Homo sapiens cDNA FLJ20338 fis, clone H | 2.433 | 0.306 | upregulate stage |
| 128610 | L38608 | Hs.10247 | activated leucocyte cell adhesion molecu | 4.34 | 0.14 | upregulate stage |
| 129041 | H58873 | “Hs.169902 | “solute carrier family 2 (facilitated gI | 2.003 | 0.455 | upregulate stage |
| 129466 | L42583 | “Hs.111758 | keratin 6A | 11.584 | 0.042 | upregulate stage |
| 130627 | L23808 | Hs.1695 | matrix metalloproteinase 12 (macrophage | 2.376 | 0.233 | upregulate stage |
| 132349 | Y00705 | “Hs.181286 | “serine protease inhibitor, Kazal type 1 | 5.4 | 0.132 | upregulate stage |
| 132710 | W93726 | Hs.55279 | “seine (or cysteine) proteinase inhibit | 3.888 | 0.187 | upregulate stage |
| 133391 | X57579 | Hs.727 | “inhibin, beta A (activin A, activin AB | 1.517 | 0.334 | upregulate stage |
| 134110 | AA242758 | “Hs.79136 | “LIV-1 protein, estrogen regulated” | 2.221 | 0.387 | upregulate stage |
| 400289 | X07820 | Hs.2258 | matrix metalloproteinase 10 (stromelysin | 4.85 | 0.03 | upregulate stage |
| 400297 | AI127076 | Hs.288381 | hypothetical protein DKFZp564O1278 | 3.54 | 0.13 | upregulate stage |
| 400346 | AB041269 | Hs.272263 | Homo sapiens mRNA for keratin 19, partia | 8.95 | 0.07 | upregulate stage |
| 400419 | AF084545 | Hs.81800 | chondroitin sulfate proteoglycan 2 (vers | 10.7 | 0.06 | upregulate stage |
| 400495 | | | | 1 | 0.56 | upregulate stage |
| 400509 | M97639 | Hs.155585 | receptor tyrosine kinase-like orphan rec | 1.52 | 0.51 | upregulate stage |
| 400528 | | | | 3.47 | 0.23 | upregulate stage |
| 400577 | | | | 1 | 0.29 | upregulate stage |
| 400608 | | | | 7.2 | 0.08 | upregulate stage |
| 400644 | | | | 1 | 1 | upregulate stage |
| 400666 | | | | 1.42 | 0.43 | upregulate stage |
| 400750 | | | | 8.7 | 0.1 | upregulate stage |
| 400773 | | | | 1.11 | 0.51 | upregulate stage |
| 400844 | | | | 9.65 | 0.04 | upregulate stage |
| 400845 | | | | 2.3 | 0.28 | upregulate stage |
| 400846 | | | | 1.34 | 0.5 | upregulate stage |
| 400880 | | | | 9.4 | 0.06 | upregulate stage |
| 400887 | | | | 1 | 1 | upregulate stage |
| 401086 | | | | 1 | 0.51 | upregulate stage |
| 401093 | | | | 7 | 0.08 | upregulate stage |
| 401101 | | | | 1 | 0.17 | upregulate stage |
| 401197 | | | | 5.18 | 0.14 | upregulate stage |
| 401262 | | | | 1 | 1 | upregulate stage |
| 401271 | | | | 1 | 1 | upregulate stage |
| 401279 | | | | 9.1 | 0.06 | upregulate stage |
| 401342 | | | | 1.42 | 0.5 | upregulate stage |
| 401345 | M83738 | Hs.147663 | protein tyrosine phosphatase, non-recept | 1 | 0.33 | upregulate stage |
| 401365 | | | | 6.5 | 0.11 | upregulate stage |
| 401395 | | | | 1 | 0.31 | upregulate stage |
| 401420 | | | | 1 | 1 | upregulate stage |
| 401439 | | | | 2.65 | 0.17 | upregulate stage |
| 401451 | | | | 12 | 0.05 | upregulate stage |
| 401599 | BE247275 | Hs.151787 | U5 snRNP-specific protein, 116 kD | 9.15 | 0.08 | upregulate stage |
| 401600 | BE247275 | Hs.151787 | U5 snRNP-specific protein, 116 kD | 8.75 | 0.09 | upregulate stage |
| 401694 | | | | 1 | 1 | upregulate stage |
| 401747 | | | | 29.75 | 0.02 | upregulate stage |
| 401759 | | | | 11.35 | 0.06 | upregulate stage |
| 401780 | | | | 6.15 | 0.07 | upregulate stage |
| 401868 | AC005261 | Hs.98338 | serine/threonine kinase 13 (aurora/IPL1- | 1 | 0.69 | upregulate stage |
| 401994 | | | | 3.15 | 0.15 | upregulate stage |
| 402001 | | | | 4.4 | 0.14 | upregulate stage |
| 402230 | | | | 8.75 | 0.06 | upregulate stage |
| 402325 | | | | 1 | 0.36 | upregulate stage |
| 402408 | | | | 5.15 | 0.1 | upregulate stage |
| 402472 | | | | 9.05 | 0.08 | upregulate stage |
| 402480 | | | | 1 | 1 | upregulate stage |
| 402490 | | | | 9.6 | 0.07 | upregulate stage |
| 402553 | | | | 9.85 | 0.09 | upregulate stage |
| 402889 | | | | 9.4 | 0.09 | upregulate stage |
| 402901 | | | | 1.07 | 0.65 | upregulate stage |
| 402938 | | | | 1 | 1 | upregulate stage |
| 402995 | | | | 9.6 | 0.06 | upregulate stage |
| 403005 | | | | 1.5 | 0.21 | upregulate stage |
| 403020 | | | | 5.15 | 0.12 | upregulate stage |
| 403052 | R58624 | Hs.2186 | eukaryotic translation elongation factor | 1 | 1 | upregulate stage |
| 403053 | R58624 | Hs.2186 | eukaryotic translation elongation factor | 1.5 | 0.28 | upregulate stage |
| 403073 | | | | 1 | 0.37 | upregulate stage |
| 403085 | | | | 1 | 0.43 | upregulate stage |
| 403106 | | | | 1.12 | 0.57 | upregulate stage |
| 403152 | AA576664 | Hs.37078 | v-crk avian sarcoma virus CT10 oncogene | 0.86 | 1.08 | upregulate stage |
| 403172 | | | | 7.7 | 0.09 | upregulate stage |
| 403212 | | | | 1.18 | 0.62 | upregulate stage |
| 403214 | | | | 6.05 | 0.1 | upregulate stage |
| 403277 | | | | 4.5 | 0.11 | upregulate stage |
| 403331 | | | | 3.2 | 0.13 | upregulate stage |
| 403381 | | | | 10.7 | 0.05 | upregulate stage |
| 403485 | | | | 10.35 | 0.08 | upregulate stage |
| 403588 | | | | 1 | 1 | upregulate stage |
| 403851 | | | | 2.45 | 0.34 | upregulate stage |
| 403860 | | | | 1 | 1 | upregulate stage |
| 403894 | | | | 4.45 | 0.14 | upregulate stage |
| 403903 | | | | 1.39 | 0.58 | upregulate stage |
| 403954 | W28077 | Hs.79389 | nel (chicken)-like 2 | 1 | 1 | upregulate stage |
| 404148 | | | | 9.15 | 0.08 | upregulate stage |
| 404229 | | | | 1 | 1 | upregulate stage |
| 404268 | | | | 1 | 1 | upregulate stage |
| 404274 | | | | 1.3 | 0.2 | upregulate stage |
| 404288 | | | | 1 | 0.39 | upregulate stage |
| 404403 | | | | 1 | 0.28 | upregulate stage |
| 404440 | | | | 7.05 | 0.06 | upregulate stage |
| 404507 | | | | 1 | 0.33 | upregulate stage |
| 404516 | | | | 1 | 1 | upregulate stage |
| 404639 | | | | 1 | 1 | upregulate stage |
| 404684 | | | | 0.89 | 0.9 | upregulate stage |
| 404685 | | | | 2.74 | 0.26 | upregulate stage |
| 404704 | | | | 9.35 | 0.08 | upregulate stage |
| 404829 | | | | 1 | 0.24 | upregulate stage |
| 404860 | | | | 3.65 | 0.15 | upregulate stage |
| 404894 | | | | 2.05 | 0.16 | upregulate stage |
| 404939 | | | | 1 | 1 | upregulate stage |
| 405034 | AL035754 | Hs.2474 | toll-like receptor 1 | 1 | 0.18 | upregulate stage |
| 405059 | | | | 1 | 0.56 | upregulate stage |
| 405064 | | | | 1 | 0.22 | upregulate stage |
| 405102 | | | | 9.65 | 0.08 | upregulate stage |
| 405167 | | | | 1 | 0.67 | upregulate stage |
| 405170 | | | | 1 | 0.48 | upregulate stage |
| 405177 | | | | 1 | 0.22 | upregulate stage |
| 405186 | | | | 3.75 | 0.1 | upregulate stage |
| 405258 | | | | 8.85 | 0.09 | upregulate stage |
| 405281 | | | | 1 | 1 | upregulate stage |
| 405379 | | | | 1 | 0.87 | upregulate stage |
| 405494 | | | | 5 | 0.13 | upregulate stage |
| 405520 | | | | 1 | 0.95 | upregulate stage |
| 405526 | | | | 8.96 | 0.08 | upregulate stage |
| 405725 | | | | 3.3 | 0.12 | upregulate stage |
| 405738 | | | | 0.86 | 0.69 | upregulate stage |
| 405809 | | | | 2.4 | 0.18 | upregulate stage |
| 405838 | | | | 1 | 0.22 | upregulate stage |
| 405906 | | | | 2.6 | 0.12 | upregulate stage |
| 406137 | | | | 1.54 | 0.52 | upregulate stage |
| 406187 | | | | 3.2 | 0.14 | upregulate stage |
| 406322 | | | | 3.95 | 0.12 | upregulate stage |
| 406360 | | | | 4.1 | 0.1 | upregulate stage |
| 406397 | | | | 1 | 0.24 | upregulate stage |
| 406434 | | | | 7.4 | 0.07 | upregulate stage |
| 406467 | | | | 9.1 | 0.07 | upregulate stage |
| 406511 | | | | 1 | 1 | upregulate stage |
| 406517 | W28077 | Hs.79389 | nel (chicken)-like 2 | 1 | 1 | upregulate stage |
| 406588 | | | | 0.93 | 0.91 | upregulate stage |
| 406651 | AI559224 | Hs.277477 | major histocompatibility complex, class | 10.1 | 0.07 | upregulate stage |
| 406665 | U22961 | Hs.75442 | albumin | 1.08 | 0.81 | upregulate stage |
| 406671 | AA129547 | Hs.285754 | met proto-oncogene (hepatocyte growth fa | 5.7 | 0.12 | upregulate stage |
| 406687 | M31126 | Hs.272620 | pregnancy specific beta-1-glycoprotein 9 | 1.95 | 0.3 | upregulate stage |
| 406732 | AA487229 | Hs.2064 | vimentin | 1 | 0.77 | upregulate stage |
| 406747 | AI925153 | Hs.217493 | annexin A2 | 3.6 | 0.14 | upregulate stage |
| 406753 | AA505665 | Hs.217493 | annexin A2 | 5.45 | 0.13 | upregulate stage |
| 406815 | AA833930 | Hs.288036 | tRNA isopentenylpyrophosphate transferas | 3.65 | 0.09 | upregulate stage |
| 406850 | AI624300 | Hs.172928 | collagen, type I, alpha 1 | 1.29 | 0.62 | upregulate stage |
| 406892 | D55643 | | gb: Human spleen PABL (pseudoautosomal bo | 1 | 1 | upregulate stage |
| 406944 | J04742 | Hs.247945 | Human autonomous replicating sequence H1 | 1 | 1 | upregulate stage |
| 406950 | L17325 | Hs.278 | pre-T/NK cell associated protein | 1 | 0.36 | upregulate stage |
| 406961 | L77563 | | gb: Homo sapiens DGS-F partial mRNA. | 1 | 1 | upregulate stage |
| 406964 | M21305 | Hs.247946 | Human alpha satellite and satellite 3 ju | 42.25 | 0.01 | upregulate stage |
| 406993 | S83249 | | gb: NG-TRA = transporter protein/putative h | 1 | 1 | upregulate stage |
| 407017 | U48697 | | gb: Human mariner-like element-containing | 1 | 1 | upregulate stage |
| 407073 | Y10510 | | gb: H. sapiens mRNA for CD67S protein. | 1 | 0.53 | upregulate stage |
| 407105 | S64699 | Hs.663 | cystic fibrosis transmembrane conductanc | 1 | 1 | upregulate stage |
| 407128 | R83312 | Hs.237260 | EST | 1 | 1 | upregulate stage |
| 407132 | T02871 | Hs.228523 | EST | 1 | 0.45 | upregulate stage |
| 407137 | T97307 | Hs.199067 | v-erb-b2 avian erythroblastic leukemia v | 14.3 | 0.05 | upregulate stage |
| 407158 | N49839 | | gb: yz08b10.s1 Soares multiple_sclerosis_{—} | 1 | 0.57 | upregulate stage |
| 407175 | T86603 | | gb: yd87d12.s1 Soares fetal liver spleen | 1 | 0.31 | upregulate stage |
| 407186 | AA435610 | | gb: zt74b11.s1 Soares_testis_NHT Homo sap | 1 | 1 | upregulate stage |
| 407189 | AA598927 | | gb: ae37e03.s1 Gessler Wilms tumor Homo s | 1 | 1 | upregulate stage |
| 407192 | AA609200 | | gb: af12e02.s1 Soares_testis_NHT Homo sap | 6.05 | 0.12 | upregulate stage |
| 407195 | C21124 | | gb: HUMGS0002072 Human adult (K. Okubo) Ho | 1 | 1 | upregulate stage |
| 407202 | N58172 | Hs.109370 | ESTs | 3.7 | 0.16 | upregulate stage |
| 407204 | R41933 | Hs.140237 | ESTs, Weakly similar to AF119917 13 PRO1 | 10.2 | 0.06 | upregulate stage |
| 407205 | R78910 | Hs.272620 | pregnancy specific beta-1-glycoprotein 9 | 1.9 | 0.22 | upregulate stage |
| 407211 | T95828 | Hs.230070 | EST | 1 | 0.59 | upregulate stage |
| 407346 | AI090210 | Hs.264106 | ESTs | 1 | 1 | upregulate stage |
| 407422 | AF116633 | | gb: Homo sapiens PRO1318 mRNA, complete c | 1 | 0.22 | upregulate stage |
| 407494 | U10072 | | gb: Human forkhead family (AFX1) mRNA, pa | 4.1 | 0.13 | upregulate stage |
| 407547 | Y10259 | | gb: H. sapiens ACTH receptor mRNA 3′UTR. | 2.45 | 0.19 | upregulate stage |
| 407564 | AA042860 | Hs.103005 | ESTs | 1 | 1 | upregulate stage |
| 407603 | AW955705 | Hs.62604 | ESTs | 1.18 | 0.73 | upregulate stage |
| 407634 | AW016569 | Hs.301280 | ESTs, Highly similar to AF241831 1 intra | 9.6 | 0.06 | upregulate stage |
| 407668 | BE161086 | Hs.279817 | ESTs | 1 | 0.39 | upregulate stage |
| 407709 | AA456135 | Hs.23023 | ESTs | 6.8 | 0.12 | upregulate stage |
| 407710 | AW022727 | Hs.23616 | ESTs | 3.9 | 0.14 | upregulate stage |
| 407725 | BE388094 | Hs.21857 | ESTs | 9.97 | 0.07 | upregulate stage |
| 407729 | T40707 | Hs.270862 | ESTs | 9.2 | 0.09 | upregulate stage |
| 407774 | AA084958 | | gb: zn13d12.r1 Stratagene hNT neuron (937 | 2.65 | 0.22 | upregulate stage |
| 407788 | BE514982 | Hs.38991 | S100 calcium-binding protein A2 | 2.1 | 0.34 | upregulate stage |
| 407811 | AW190902 | Hs.40098 | cysteine knot superfamily 1, BMP antagon | 8.45 | 0.06 | upregulate stage |
| 407813 | AL120247 | Hs.40109 | KIAA0872 protein | 9.1 | 0.08 | upregulate stage |
| 407833 | AW955632 | Hs.66666 | ESTs | 9.2 | 0.07 | upregulate stage |
| 407839 | AA045144 | Hs.161566 | ESTs | 2.11 | 0.25 | upregulate stage |
| 407853 | AA336797 | Hs.40499 | dickkopf (Xenopus laevis) homolog 1 | 1 | 0.34 | upregulate stage |
| 407881 | AW072003 | Hs.40968 | heparan sulfate (glucosamine) 3-O-sulfot | 3.52 | 0.18 | upregulate stage |
| 407882 | AI241264 | Hs.62772 | ESTs | 1 | 0.26 | upregulate stage |
| 407910 | AA650274 | Hs.41296 | fibronectin leucine rich transmembrane p | 13.6 | 0.05 | upregulate stage |
| 407911 | AF104922 | Hs.41565 | growth differentiation factor 8 | 1 | 1 | upregulate stage |
| 407912 | AW104401 | Hs.243489 | ESTs, Weakly similar to AF151881 1 CGI-1 | 10.35 | 0.07 | upregulate stage |
| 407935 | U31986 | Hs.41683 | cartilage paired-class homeoprotein 1 | 4.25 | 0.12 | upregulate stage |
| 407939 | W05608 | | gb: za85e07.r1 Soares_fetal_lung_NbHL19W | 8.75 | 0.09 | upregulate stage |
| 407944 | R34008 | Hs.239727 | desmocollin 2 | 9.2 | 0.06 | upregulate stage |
| 407945 | X69208 | Hs.606 | ATPase, Cu++ transporting, alpha polypep | 1.45 | 0.25 | upregulate stage |
| 407946 | AA226495 | Hs.154292 | ESTs | 9.4 | 0.07 | upregulate stage |
| 407949 | W21874 | Hs.247057 | ESTs | 3.32 | 0.2 | upregulate stage |
| 407974 | AW968123 | Hs.146401 | small inducible cytokine subfamily E, me | 3.55 | 0.14 | upregulate stage |
| 407983 | U40371 | Hs.41718 | phosphodiesterase 1C, calmodulin-depende | 8.95 | 0.07 | upregulate stage |
| 407994 | AW135309 | Hs.244331 | ESTs | 4.5 | 0.12 | upregulate stage |
| 408000 | L11690 | Hs.620 | bullous pemphigoid antigen 1 (230/240 kD) | 2.89 | 0.19 | upregulate stage |
| 408014 | AA723782 | Hs.41749 | protein kinase, cGMP-dependent, type II | 1.31 | 0.53 | upregulate stage |
| 408031 | AA081395 | Hs.42173 | Homo sapiens cDNA FLJ10366 fis, clone NT | 3.6 | 0.17 | upregulate stage |
| 408046 | AW139121 | Hs.183643 | ESTs | 1 | 0.36 | upregulate stage |
| 408063 | BE086548 | Hs.42346 | calcineurin-binding protein calsarcin-1 | 10.75 | 0.05 | upregulate stage |
| 408092 | NM_007057 | Hs.42650 | ZW10 interactor | 4.7 | 0.13 | upregulate stage |
| 408101 | AW968504 | Hs.123073 | CDC2-related protein kinase 7 | 4.5 | 0.14 | upregulate stage |
| 408141 | U69205 | Hs.45152 | ESTs, Moderately similar to neurogenic b | 4.4 | 0.13 | upregulate stage |
| 408170 | AW204516 | Hs.31835 | ESTs | 5.85 | 0.13 | upregulate stage |
| 408184 | AW168741 | Hs.22249 | ESTs | 1 | 1 | upregulate stage |
| 408224 | AW175997 | | gb: QV0-BT0078-190899-005-E02 BT0078 Homo | 1 | 0.44 | upregulate stage |
| 408239 | AA053401 | Hs.271827 | ESTs, Moderately similar to ALU7_HUMAN A | 9.95 | 0.04 | upregulate stage |
| 408241 | AW176546 | | gb: MR0-CT0063-200899-001-a01 CT0063 Homo | 2.8 | 0.17 | upregulate stage |
| 408268 | AL138247 | | gb: DKFZp547D237_r1 547 (synonym: hfbr1) | 1 | 0.61 | upregulate stage |
| 408277 | AW177959 | | gb: IL3-HT0060-200899-008-D03 HT0060 Homo | 1 | 1 | upregulate stage |
| 408306 | BE141991 | | gb: PM2-HT0134-220999-002-d10 HT0134 Homo | 1 | 1 | upregulate stage |
| 408352 | AA053875 | Hs.95310 | ESTs | 1 | 1 | upregulate stage |
| 408360 | AI806090 | Hs.44344 | hypothetical protein FLJ20534 | 9.15 | 0.08 | upregulate stage |
| 408393 | AW015318 | Hs.23165 | ESTs | 9.35 | 0.07 | upregulate stage |
| 408396 | AA330496 | Hs.40840 | ESTs | 1 | 0.61 | upregulate stage |
| 408442 | R59608 | Hs.21435 | ESTs | 1 | 1 | upregulate stage |
| 408514 | AW206559 | Hs.255903 | ESTs | 1 | 0.34 | upregulate stage |
| 408572 | AA055611 | Hs.226568 | ESTs, Moderately similar to ALU4_HUMAN A | 1 | 0.33 | upregulate stage |
| 408617 | R61736 | Hs.124128 | ESTs | 2.75 | 0.14 | upregulate stage |
| 408633 | AW963372 | Hs.46677 | PRO2000 protein | 3.14 | 0.25 | upregulate stage |
| 408706 | AW438503 | Hs.256935 | ESTs | 8.45 | 0.09 | upregulate stage |
| 408713 | NM_001248 | Hs.47042 | ectonucleoside triphosphate diphosphohyd | 2.81 | 0.21 | upregulate stage |
| 408725 | AA131539 | Hs.15669 | ESTs | 9.1 | 0.08 | upregulate stage |
| 408728 | AL137379 | Hs.47125 | hypothetical protein FLJ13912 | 3.1 | 0.11 | upregulate stage |
| 408738 | NM_014785 | Hs.47313 | KIAA0258 gene product | 4.4 | 0.13 | upregulate stage |
| 408739 | W01556 | Hs.238797 | ESTs | 5.65 | 0.11 | upregulate stage |
| 408754 | N31256 | Hs.161623 | ESTs | 1 | 1 | upregulate stage |
| 408765 | AA057268 | Hs.146013 | ESTs | 8.75 | 0.09 | upregulate stage |
| 408805 | H69912 | Hs.48269 | vaccinia related kinase 1 | 4.95 | 0.12 | upregulate stage |
| 408813 | AI580090 | Hs.48295 | RNA helicase family | 3.65 | 0.17 | upregulate stage |
| 408817 | AA524525 | Hs.279864 | PRO1996 protein | 6.15 | 0.12 | upregulate stage |
| 408849 | BE219451 | Hs.254919 | ESTs | 1 | 0.32 | upregulate stage |
| 408902 | AW014869 | Hs.5510 | ESTs | 3.3 | 0.15 | upregulate stage |
| 408908 | BE296227 | Hs.48915 | serine/threonine kinase 15 | 5.65 | 0.1 | upregulate stage |
| 408916 | AW295232 | Hs.22893 | ESTs | 10 | 0.08 | upregulate stage |
| 408933 | AA058979 | Hs.182133 | ESTs, Highly similar to ADP-ribosylation | 1 | 0.91 | upregulate stage |
| 408943 | NM_007070 | Hs.49105 | FKBP-associated protein | 3.45 | 0.16 | upregulate stage |
| 408960 | BE158389 | Hs.300976 | ESTs | 6.3 | 0.1 | upregulate stage |
| 409032 | AW301807 | Hs.297260 | ESTs | 8.4 | 0.08 | upregulate stage |
| 409093 | BE243834 | Hs.50441 | CGI-04 protein | 1.71 | 0.49 | upregulate stage |
| 409099 | AK000725 | Hs.50579 | hypothetical protein FLJ20718 | 10.1 | 0.07 | upregulate stage |
| 409142 | AL136877 | Hs.50758 | chromosome-associated polypeptide C | 11.85 | 0.05 | upregulate stage |
| 409203 | AA780473 | Hs.687 | cytochrome P450, subfamily IVB, polypept | 2.83 | 0.24 | upregulate stage |
| 409231 | AA446644 | Hs.692 | tumor-associated calcium signal transduc | 9.34 | 0.08 | upregulate stage |
| 409262 | AK000631 | Hs.52256 | hypothetical protein FLJ20624 | 8.7 | 0.09 | upregulate stage |
| 409357 | M73628 | Hs.54415 | casein, kappa | 1.6 | 0.2 | upregulate stage |
| 409402 | AF208234 | Hs.695 | cystatin B (stefin B) | 1.57 | 0.56 | upregulate stage |
| 409405 | AA075869 | Hs.126400 | ESTs, Highly similar to RL39_HUMAN 60S R | 2.6 | 0.12 | upregulate stage |
| 409408 | AW387837 | | gb: MR4-ST0118-021299-021-f08 ST0118 Homo | 4.3 | 0.15 | upregulate stage |
| 409420 | Z15008 | Hs.54451 | laminin, gamma 2 (nicein (100 kD), kalini | 8.28 | 0.06 | upregulate stage |
| 409509 | AL036923 | Hs.127006 | ESTs | 10.2 | 0.06 | upregulate stage |
| 409566 | AA078899 | | gb: zm94b01.r1 Stratagene colon HT29 (937 | 1 | 0.56 | upregulate stage |
| 409575 | AW419225 | Hs.256247 | ESTs | 2.15 | 0.14 | upregulate stage |
| 409582 | R27430 | Hs.271565 | ESTs | 7.3 | 0.07 | upregulate stage |
| 409632 | W74001 | Hs.55279 | serine (or cysteine) proteinase inhibito | 3.78 | 0.19 | upregulate stage |
| 409642 | AW450809 | Hs.257347 | ESTs | 9.55 | 0.07 | upregulate stage |
| 409674 | AI935146 | Hs.278611 | UDP-N-acetyl-alpha-D-galactosamine: polyp | 1 | 0.29 | upregulate stage |
| 409691 | T89983 | Hs.246042 | ESTs | 1 | 1 | upregulate stage |
| 409703 | NM_006187 | Hs.56009 | 2′-5′ oligoadenylate synthetase 3 | 2.22 | 0.36 | upregulate stage |
| 409727 | N63786 | Hs.94149 | ESTs, Weakly similar to ALU1_HUMAN ALU S | 1 | 0.57 | upregulate stage |
| 409760 | AA302840 | | gb: EST10534 Adipose tissue, white I Homo | 9.95 | 0.06 | upregulate stage |
| 409789 | BE256027 | Hs.180946 | ribosomal protein L5 | 1 | 0.83 | upregulate stage |
| 409794 | AW885691 | | gb: RC4-OT0071-240300-013-b04 OT0071 Homo | 1 | 1 | upregulate stage |
| 409977 | AW805510 | Hs.97056 | hypothetical protein FLJ21634 | 9.65 | 0.07 | upregulate stage |
| 409985 | AW291944 | Hs.122139 | ESTs | 4.35 | 0.14 | upregulate stage |
| 409989 | R37868 | Hs.13333 | ESTs | 1 | 0.21 | upregulate stage |
| 409995 | AW960597 | Hs.30164 | ESTs | 5.05 | 0.12 | upregulate stage |
| 410013 | AF067173 | Hs.57904 | mago-nashi (Drosophila) homolog, prolife | 3.05 | 0.26 | upregulate stage |
| 410044 | BE566742 | Hs.58169 | highly expressed in cancer, rich in leuc | 3.15 | 0.09 | upregulate stage |
| 410071 | AW582568 | | gb: RC1-ST0278-080100-011-h04 ST0278 Home | 2.5 | 0.18 | upregulate stage |
| 410102 | AW248508 | Hs.279727 | Homo sapiens cDNA FLJ14035 fis, clone HE | 8 | 0.06 | upregulate stage |
| 410114 | AW590540 | Hs.271280 | ESTs | 5.1 | 0.14 | upregulate stage |
| 410117 | AK001586 | Hs.58650 | hypothetical protein FLJ10724 | 1 | 1 | upregulate stage |
| 410153 | BE311926 | Hs.15830 | Homo sapiens cDNA FLJ12691 fis, clone NT | 4.7 | 0.11 | upregulate stage |
| 410181 | AI468210 | Hs.261285 | pleiotropic regulator 1 (PRL1, Arabidops | 1 | 0.23 | upregulate stage |
| 410196 | AI936442 | Hs.59838 | hypothetical protein FLJ10808 | 6.05 | 0.09 | upregulate stage |
| 410252 | AW821182 | Hs.61418 | microfibrillar-associated protein 1 | 5.55 | 0.12 | upregulate stage |
| 410259 | AK000337 | Hs.61485 | hypothetical protein | 10.1 | 0.07 | upregulate stage |
| 410276 | AI554545 | Hs.68301 | ESTs | 2.98 | 0.25 | upregulate stage |
| 410278 | AW614396 | Hs.282230 | ESTs | 1 | 0.28 | upregulate stage |
| 410325 | AB023154 | Hs.62264 | KIAA0937 protein | 6.85 | 0.13 | upregulate stage |
| 410356 | BE244668 | Hs.62643 | dual adaptor of phosphotyrosine and 3-ph | 1 | 1 | upregulate stage |
| 410388 | AA831460 | Hs.22039 | hepatocyte nuclear factor 3, alpha | 1 | 0.33 | upregulate stage |
| 410399 | BE068889 | Hs.63236 | synuclein, gamma (breast cancer-specific | 1.07 | 0.78 | upregulate stage |
| 410420 | AA224053 | Hs.172405 | ESTs, Moderately similar to I52835 H-NUC | 1 | 0.14 | upregulate stage |
| 410429 | AA310600 | Hs.63657 | hypothetical protein FLJ11005 | 11.25 | 0.07 | upregulate stage |
| 410442 | X73424 | Hs.63788 | propionyl Coenzyme A carboxylase, beta p | 9.6 | 0.08 | upregulate stage |
| 410475 | AW749927 | | gb: QV0-BT0537-231299-049-f03 BT0537 Home | 9.8 | 0.08 | upregulate stage |
| 410495 | N95428 | | gb: zb80d09.s1 Soares_senescent_fibroblas | 11.3 | 0.06 | upregulate stage |
| 410501 | AI675688 | Hs.83286 | ESTs | 4.75 | 0.1 | upregulate stage |
| 410503 | AW975746 | Hs.188662 | Homo sapiens cDNA: FLJ23421 fis, clone H | 6.5 | 0.1 | upregulate stage |
| 410520 | AW752710 | | gb: IL3-CT0219-281099-024-A03 CT0219 Homo | 1 | 1 | upregulate stage |
| 410534 | AW905138 | | gb: QV0-NN1071-280400-207-g07 NN1071 Homo | 3.1 | 0.16 | upregulate stage |
| 410537 | AW753108 | | gb: PM1-CT0247-080100-008-e10 CT0247 Homo | 10.35 | 0.08 | upregulate stage |
| 410553 | AW016824 | Hs.68784 | ESTs | 1.67 | 0.41 | upregulate stage |
| 410560 | N29220 | | gb: yx43b05.r1 Soares melanocyte 2NbHM Ho | 9 | 0.07 | upregulate stage |
| 410561 | BE540255 | Hs.6994 | Homo sapiens cDNA: FLJ22044 fis, clone H | 6.2 | 0.11 | upregulate stage |
| 410562 | AW858528 | | gb: CM3-CT0341-150300-119-h11 CT0341 Homo | 1 | 1 | upregulate stage |
| 410579 | AK001628 | Hs.64691 | KIAA0483 protein | 11.1 | 0.06 | upregulate stage |
| 410634 | AW888653 | Hs.266859 | ESTs | 1 | 1 | upregulate stage |
| 410664 | NM_006033 | Hs.65370 | lipase, endothelial | 3.95 | 0.1 | upregulate stage |
| 410668 | BE379794 | Hs.65403 | hypothetical protein | 1.82 | 0.41 | upregulate stage |
| 410730 | AW368860 | Hs.293950 | ESTs | 9.25 | 0.07 | upregulate stage |
| 410751 | AA357918 | | gb: EST66726 Fetal lung III Homo sapiens | 1 | 1 | upregulate stage |
| 410754 | T63840 | | gb: yc16b10.s1 Stratagene lung (937210) H | 3.1 | 0.14 | upregulate stage |
| 410762 | AF226053 | Hs.66170 | HSKM-B protein | 5.55 | 0.1 | upregulate stage |
| 410764 | AW978159 | Hs.250164 | ESTs, Weakly similar to coded for by C. | 1 | 0.2 | upregulate stage |
| 410782 | AW504860 | Hs.288836 | Homo sapiens cDNA FLJ12673 fis, clone NT | 1.75 | 0.25 | upregulate stage |
| 410794 | AA248010 | Hs.154669 | ESTs | 1 | 0.67 | upregulate stage |
| 410804 | U64820 | Hs.66521 | Machado-Joseph disease (spinocerebellar | 3.2 | 0.17 | upregulate stage |
| 410844 | AW807073 | | gb: MR4-ST0062-031199-018-d06 ST0062 Homo | 1 | 0.8 | upregulate stage |
| 410855 | X97795 | Hs.66718 | RAD54 (S. cerivisiae)-like | 6.5 | 0.12 | upregulate stage |
| 410910 | AW810204 | | gb: MR4-ST0125-021199-017-d08 ST0125 Homo | 9.35 | 0.08 | upregulate stage |
| 410973 | AW812278 | | gb: RC0-ST0174-211099-011-h12 ST0174 Homo | 1 | 1 | upregulate stage |
| 410976 | R36207 | Hs.25092 | ESTs | 8.35 | 0.1 | upregulate stage |
| 410997 | AW812877 | | gb: RC3-ST0186-300100-017-e04 ST0186 Homo | 1 | 1 | upregulate stage |
| 410998 | W28247 | Hs.82007 | KIAA0094 protein | 2.45 | 0.18 | upregulate stage |
| 411036 | AA857218 | Hs.297007 | ESTs | 4.05 | 0.14 | upregulate stage |
| 411110 | H93000 | | gb: yv07f01.s1 Soares fetal liver spleen | 1 | 0.36 | upregulate stage |
| 411132 | AW819191 | | gb: CM1-ST0283-071299-061-d08 ST0283 Homo | 1 | 1 | upregulate stage |
| 411137 | AW819455 | | gb: RC5-ST0293-021299-031-A04 ST0293 Homo | 3.65 | 0.18 | upregulate stage |
| 411157 | AW819867 | | gb: QV0-ST0294-070300-151-f02 ST0294 Homo | 3.2 | 0.2 | upregulate stage |
| 411159 | AW820178 | | gb: QV0-ST0294-100400-185-e07 ST0294 Homo | 1 | 0.27 | upregulate stage |
| 411170 | AW820503 | | gb: QV2-ST0298-140200-042-b05 ST0298 Homo | 1 | 1 | upregulate stage |
| 411193 | AW821484 | | gb: IL2-ST0311-211299-028-F12 ST0311 Homo | 1 | 0.24 | upregulate stage |
| 411242 | BE146808 | | gb: QV4-HT0222-181099-013-g03 HT0222 Homo | 2.55 | 0.26 | upregulate stage |
| 411245 | AW833441 | | gb: QV4-TT0008-271099-020-g01 TT0008 Homo | 9.62 | 0.09 | upregulate stage |
| 411263 | BE297802 | Hs.69360 | kinesin-like 6 (mitotic centromere-assoc | 2.4 | 0.32 | upregulate stage |
| 411282 | AW995011 | | gb: QV0-BN0040-170300-161-d07 BN0040 Homo | 1 | 1 | upregulate stage |
| 411284 | N28519 | Hs.135191 | ESTs, Weakly similar to unnamed protein | 3.25 | 0.12 | upregulate stage |
| 411294 | AW859729 | Hs.42680 | ESTs | 1 | 1 | upregulate stage |
| 411327 | AW836922 | | gb: QV1-LT0036-150200-074-h06 LT0036 Homo | 1 | 0.37 | upregulate stage |
| 411338 | AW731782 | Hs.116122 | ESTs, Weakly similar to unnamed protein | 5 | 0.13 | upregulate stage |
| 411339 | BE164598 | | gb: RC3-HT0470-120200-013-b10 HT0470 Homo | 1 | 0.25 | upregulate stage |
| 411383 | AA001394 | Hs.69749 | KIAA0087 gene product | 3.6 | 0.18 | upregulate stage |
| 411387 | AW842339 | Hs.130815 | hypothetical protein FLJ21870 | 8.75 | 0.09 | upregulate stage |
| 411400 | AA311919 | Hs.69851 | GAR1 protein | 12.1 | 0.07 | upregulate stage |
| 411425 | AW846012 | | gb: RC2-CT0163-230999-003-E01 CT0163 Homo | 1 | 0.74 | upregulate stage |
| 411461 | AW847937 | | gb: IL3-CT0213-210200-042-D02 CT0213 Homo | 1 | 1 | upregulate stage |
| 411526 | AW850327 | | gb: IL3-CT0219-221199-029-D08 CT0219 Homo | 1 | 1 | upregulate stage |
| 411560 | AW851186 | | gb: IL3-CT0220-150200-071-H05 CT0220 Homo | 2.8 | 0.17 | upregulate stage |
| 411568 | BE144593 | | gb: MR0-HT0167-141199-002-f04 HT0167 Homo | 1 | 1 | upregulate stage |
| 411571 | AA122393 | Hs.70811 | hypothetical protein FLJ20516 | 3.55 | 0.14 | upregulate stage |
| 411605 | AW006831 | Hs.20479 | ESTs | 9.6 | 0.08 | upregulate stage |
| 411626 | AW793453 | Hs.71109 | KIAA1229 protein | 1 | 1 | upregulate stage |
| 411630 | U42349 | Hs.71119 | Putative prostate cancer tumor suppresso | 4.1 | 0.11 | upregulate stage |
| 411643 | AI924519 | Hs.192570 | Homo sapiens cDNA: FLJ22028 fis, clone H | 1 | 0.28 | upregulate stage |
| 411653 | AF070578 | Hs.71168 | Homo sapiens clone 24674 mRNA sequence | 8.9 | 0.08 | upregulate stage |
| 411727 | AW858443 | | gb: CM0-CT0341-260100-160-f10 CT0341 Homo | 1 | 1 | upregulate stage |
| 411771 | AW993247 | | gb: RC2-BN0033-180200-014-h09 BN0033 Homo | 2.6 | 0.14 | upregulate stage |
| 411787 | AW863568 | | gb: MR3-SN0010-240300-102-c10 SN0010 Homo | 1 | 1 | upregulate stage |
| 411788 | AW897793 | | gb: CM1-NN0063-280400-203-f07 NN0063 Homo | 3.7 | 0.15 | upregulate stage |
| 411826 | AW947946 | | gb: PM0-MT0011-240300-001-a09 MT0011 Homo | 3.25 | 0.13 | upregulate stage |
| 411835 | U29343 | Hs.72550 | hyaluronan-mediated motility receptor (R | 1 | 1 | upregulate stage |
| 411860 | T89420 | | gb: yd98f04.s1 Soares fetal liver spleen | 1 | 0.22 | upregulate stage |
| 411874 | AA096106 | Hs.20403 | ESTs | 5.75 | 0.11 | upregulate stage |
| 411917 | AW876360 | Hs.3592 | Homo sapiens cDNA: FLJ22555 fis, clone H | 1 | 0.33 | upregulate stage |
| 411928 | AA888624 | Hs.19121 | adaptor-related protein complex 2, alpha | 4.75 | 0.12 | upregulate stage |
| 411932 | AW876548 | | gb: RC3-PT0028-190100-012-h02 PT0028 Homo | 1 | 0.38 | upregulate stage |
| 411943 | BE502436 | Hs.7962 | ESTs, Weakly similar to putative [C. eleg | 3.82 | 0.23 | upregulate stage |
| 411945 | AL033527 | Hs.92137 | v-myc avian myelocytomatosis viral oncog | 4.65 | 0.15 | upregulate stage |
| 411991 | X58822 | Hs.73010 | interferon, omega 1 | 2.45 | 0.14 | upregulate stage |
| 412040 | D86519 | Hs.73086 | neuropeptide Y receptor Y6 (pseudogene) | 4.6 | 0.14 | upregulate stage |
| 412088 | AI689496 | Hs.108932 | ESTs | 2.82 | 0.18 | upregulate stage |
| 412134 | AW895560 | | gb: QV4-NN0038-270400-187-g08 NN0038 Homo | 6.4 | 0.1 | upregulate stage |
| 412140 | AA219691 | Hs.73625 | RAB6 interacting, kinesin-like (rabkines | 17.05 | 0.04 | upregulate stage |
| 412231 | AW902491 | Hs.289088 | heat shock 90 kD protein 1, alpha | 1 | 0.91 | upregulate stage |
| 412296 | AW936233 | | gb: QV0-DT0020-090200-107-a06 DT0020 Homo | 1 | 1 | upregulate stage |
| 412327 | AW937355 | | gb: QV3-DT0043-211299-044-a06 DT0043 Homo | 1 | 1 | upregulate stage |
| 412357 | AW939537 | | gb: QV1-DT0072-110200-066-f05 DT0072 Homo | 1 | 0.24 | upregulate stage |
| 412359 | AW837985 | | gb: QV3-LT0048-140200-083-e05 LT0048 Homo | 1 | 0.41 | upregulate stage |
| 412367 | AW945964 | | gb: QV0-ET0001-050500-228-e09 ET0001 Homo | 1 | 0.22 | upregulate stage |
| 412529 | BE271224 | Hs.266273 | Homo sapiens cDNA FLJ13346 fis, clone OV | 4.45 | 0.14 | upregulate stage |
| 412530 | AA766268 | Hs.266273 | Homo sapiens cDNA FLJ13346 fis, clone OV | 9.3 | 0.08 | upregulate stage |
| 412537 | AL031778 | Hs.797 | nuclear transcription factor Y, alpha | 4.25 | 0.14 | upregulate stage |
| 412547 | W27161 | | gb: 23a12 Human retina cDNA randomly prim | 1 | 1 | upregulate stage |
| 412559 | T31474 | | gb: EST33147 Human Embryo Homo sapiens cD | 1 | 0.26 | upregulate stage |
| 412636 | NM_004415 | Hs.74316 | desmoplakin (DPI, DPII) | 12.05 | 0.05 | upregulate stage |
| 412648 | AA115211 | Hs.69658 | EST | 1 | 0.28 | upregulate stage |
| 412668 | AA456195 | Hs.10056 | ESTs | 10.75 | 0.07 | upregulate stage |
| 412671 | AW977734 | | gb: EST389963 MAGE resequences, MAGO Homo | 2.65 | 0.3 | upregulate stage |
| 412673 | AL042957 | Hs.31845 | ESTs | 4.6 | 0.11 | upregulate stage |
| 412723 | AA648459 | Hs.179912 | ESTs | 2.55 | 0.11 | upregulate stage |
| 412739 | AA116018 | Hs.271809 | Homo sapiens cDNA: FLJ22406 fis, clone H | 1.6 | 0.24 | upregulate stage |
| 412744 | N31101 | | gb: yx52a03.r1 Soares melanocyte 2NbHM Ho | 2 | 0.23 | upregulate stage |
| 412778 | AA120882 | Hs.159244 | ESTs | 1 | 1 | upregulate stage |
| 412811 | H06382 | Hs.21400 | ESTs | 1 | 0.49 | upregulate stage |
| 412838 | D61870 | | gb: HUM218F11B Clontech human aorta polyA | 1 | 0.34 | upregulate stage |
| 412854 | BE004149 | Hs.31161 | ESTs | 1 | 1 | upregulate stage |
| 413075 | D59828 | Hs.70953 | ESTs | 1 | 0.77 | upregulate stage |
| 413109 | AW389845 | Hs.110855 | ESTs | 3.93 | 0.1 | upregulate stage |
| 413117 | BE066107 | Hs.138484 | ESTs, Weakly similar to ALU1_HUMAN ALU S | 1 | 0.22 | upregulate stage |
| 413119 | BE065941 | | gb: RC3-BT0319-100100-012-d12 BT0319 Homo | 1 | 0.87 | upregulate stage |
| 413141 | BE166323 | | gb: QV4-HT0492-270100-086-e12 HT0492 Homo | 5.45 | 0.12 | upregulate stage |
| 413219 | AA878200 | Hs.118727 | Homo sapiens cDNA FLJ13692 fis, clone PL | 2.54 | 0.19 | upregulate stage |
| 413228 | AA127518 | Hs.195870 | ESTs | 1 | 1 | upregulate stage |
| 413273 | U75679 | Hs.75257 | Hairpin binding protein, histone | 5.05 | 0.11 | upregulate stage |
| 413278 | BE563085 | Hs.833 | interferon-stimulated protein, 15 kDa | 1.45 | 0.5 | upregulate stage |
| 413294 | BE144034 | | gb: MR0-HT0165-191199-004-a02 HT0165 Homo | 1 | 1 | upregulate stage |
| 413324 | V00571 | Hs.75294 | corticotropin releasing hormone | 6.95 | 0.03 | upregulate stage |
| 413342 | AA128535 | | gb: zl24e04.r1 Soares_pregnant_uterus_NbH | 1 | 1 | upregulate stage |
| 413430 | R22479 | Hs.24650 | Homo sapiens cDNA FLJ13047 fis, clone NT | 3 | 0.18 | upregulate stage |
| 413707 | BE158679 | | gb: CM0-HT0395-280100-169-c04 HT0395 Homo | 1 | 0.28 | upregulate stage |
| 413743 | BE161004 | | gb: PM0-HT0425-170100-002-h03 HT0425 Homo | 1 | 1 | upregulate stage |
| 413753 | U17760 | Hs.301103 | Human DNA sequence from clone 272L16 on | 22.7 | 0.03 | upregulate stage |
| 413786 | AW613780 | Hs.13500 | ESTs | 9.9 | 0.07 | upregulate stage |
| 413792 | BE166924 | | gb: CM4-HT0501-240300-519-f01 HT0501 Homo | 1 | 1 | upregulate stage |
| 413804 | T64682 | | gb: yc48b02.r1 Stratagene liver (937224) | 0.99 | 0.75 | upregulate stage |
| 413833 | Z15005 | Hs.75573 | centromere protein E (312 kD) | 2.55 | 0.17 | upregulate stage |
| 413854 | BE174300 | Hs.44581 | heat shock protein hsp70-related protein | 1.25 | 0.24 | upregulate stage |
| 413918 | AW015898 | Hs.71245 | ESTs | 4 | 0.11 | upregulate stage |
| 413968 | AW500374 | Hs.64056 | ESTs | 10.85 | 0.07 | upregulate stage |
| 414091 | T83742 | | gb: yd67g02.s1 Soares fetal liver spleen | 8.9 | 0.1 | upregulate stage |
| 414099 | U11313 | Hs.75760 | sterol carrier protein 2 | 10.3 | 0.06 | upregulate stage |
| 414116 | AA587370 | Hs.71584 | ESTs | 1 | 1 | upregulate stage |
| 414127 | AI431863 | Hs.135270 | ESTs | 2.85 | 0.13 | upregulate stage |
| 414169 | AA136169 | Hs.149335 | ESTs | 8.95 | 0.09 | upregulate stage |
| 414275 | AW970254 | Hs.889 | Charot-Leyden crystal protein | 7.05 | 0.05 | upregulate stage |
| 414304 | AI621276 | Hs.165998 | DKFZP564M2423 protein | 1 | 0.24 | upregulate stage |
| 414338 | N80751 | Hs.301471 | ESTs | 10.3 | 0.08 | upregulate stage |
| 414447 | AA147549 | Hs.109909 | ESTs | 3.4 | 0.16 | upregulate stage |
| 414494 | AA768491 | Hs.6783 | Homo sapiens cDNA: FLJ22724 fis, clone H | 3.4 | 0.18 | upregulate stage |
| 414520 | AA148806 | Hs.204046 | ESTs | 1 | 0.21 | upregulate stage |
| 414569 | AF109298 | Hs.118258 | prostate cancer associated protein 1 | 3.1 | 0.18 | upregulate stage |
| 414575 | H11257 | Hs.295233 | ESTs | 3.1 | 0.15 | upregulate stage |
| 414597 | H67472 | Hs.34274 | ESTs | 4.6 | 0.11 | upregulate stage |
| 414643 | H46177 | Hs.119316 | ESTs | 1 | 0.28 | upregulate stage |
| 414658 | X58528 | Hs.76781 | ATP-binding cassette, sub-family D (ALD) | 7.75 | 0.08 | upregulate stage |
| 414661 | T97401 | Hs.21929 | ESTs | 1 | 0.26 | upregulate stage |
| 414683 | S78296 | Hs.76888 | internexin neuronal intermediate filamen | 2.72 | 0.25 | upregulate stage |
| 414735 | BE468016 | Hs.281904 | ESTs | 1 | 0.38 | upregulate stage |
| 414737 | AI160386 | Hs.125087 | ESTs | 5.5 | 0.1 | upregulate stage |
| 414747 | U30872 | Hs.77204 | centromere protein F (350/400 kD, mitosin | 3.19 | 0.24 | upregulate stage |
| 414774 | X02419 | Hs.77274 | plasminogen activator, urokinase | 1.45 | 0.49 | upregulate stage |
| 414783 | AW069569 | Hs.75839 | zinc finger protein 6 (CMPX1) | 4.65 | 0.13 | upregulate stage |
| 414799 | AI752416 | Hs.77326 | insulin-like growth factor binding prote | 1.7 | 0.46 | upregulate stage |
| 414833 | T07114 | | gb: EST05003 Fetal brain, Stratagene (cat | 4.5 | 0.13 | upregulate stage |
| 414883 | AA926960 | Hs.77550 | CDC28 protein kinase 1 | 3.36 | 0.22 | upregulate stage |
| 414885 | AA157531 | Hs.269276 | ESTs | 2.7 | 0.21 | upregulate stage |
| 414918 | AI219207 | Hs.72222 | Homo sapiens cDNA FLJ13459 fis, clone PL | 0.87 | 0.69 | upregulate stage |
| 414985 | C17372 | | gb: C17372 Clontech human aorta polyA + mR | 1 | 0.42 | upregulate stage |
| 415025 | AW207091 | Hs.72307 | ESTs | 5.3 | 0.06 | upregulate stage |
| 415033 | D31476 | Hs.301448 | Homo sapiens cDNA FLJ12152 fis, clone MA | 1 | 1 | upregulate stage |
| 415060 | AJ223810 | Hs.43213 | ESTs, Weakly similar to IEFS_HUMAN TRANS | 6.05 | 0.1 | upregulate stage |
| 415068 | Z19448 | Hs.131887 | ESTs, Weakly similar to ORF YNL227c [S.c | 4.5 | 0.13 | upregulate stage |
| 415095 | D59592 | Hs.34745 | ESTs | 1 | 0.44 | upregulate stage |
| 415099 | AI492170 | Hs.77917 | ubiquitin carboxyl-terminal esterase L3 | 2.27 | 0.29 | upregulate stage |
| 415104 | D60076 | | gb: HUM084E10A Clontech human fetal brain | 3.95 | 0.13 | upregulate stage |
| 415114 | D60468 | | gb: HUM111A06B Clontech human fetal brain | 2.05 | 0.2 | upregulate stage |
| 415138 | C18356 | Hs.78045 | tissue factor pathway inhibitor 2 | 5.8 | 0.05 | upregulate stage |
| 415139 | AW975942 | Hs.48524 | ESTs | 1.15 | 0.21 | upregulate stage |
| 415148 | Z36953 | Hs.48527 | ESTs | 2.5 | 0.2 | upregulate stage |
| 415153 | C03508 | Hs.7000 | ESTs | 8.95 | 0.09 | upregulate stage |
| 415178 | D80503 | | gb: HUM080A02B Human fetal brain (TFujiwa | 1 | 0.15 | upregulate stage |
| 415217 | H23983 | Hs.26922 | ESTs | 1 | 0.31 | upregulate stage |
| 415227 | AW821113 | Hs.72402 | ESTs | 6.3 | 0.11 | upregulate stage |
| 415238 | R37780 | Hs.21422 | ESTs | 1 | 1 | upregulate stage |
| 415241 | F02208 | Hs.27214 | ESTs | 1 | 1 | upregulate stage |
| 415295 | R41450 | Hs.6546 | ESTs | 1 | 0.63 | upregulate stage |
| 415296 | F05086 | | gb: HSC01A011 normalized infant brain cDN | 5.65 | 0.1 | upregulate stage |
| 415327 | H22769 | Hs.1861 | membrane protein, palmitoylated 1 (55 kD) | 8.15 | 0.09 | upregulate stage |
| 415330 | Z44693 | Hs.21422 | ESTs | 3 | 0.2 | upregulate stage |
| 415336 | T77664 | Hs.78362 | Human clone 23839 mRNA sequence | 1 | 0.87 | upregulate stage |
| 415337 | Z44881 | Hs.9012 | ESTs | 8.8 | 0.07 | upregulate stage |
| 415352 | F06565 | | gb: HSC1CG051 normalized infant brain cDN | 1 | 1 | upregulate stage |
| 415364 | F06771 | | gb: HSC1KD031 normalized infant brain cDN | 1 | 1 | upregulate stage |
| 415371 | R15239 | | gb: yf89b02.r1 Soares infant brain 1NIB H | 5.1 | 0.13 | upregulate stage |
| 415412 | F08049 | Hs.52132 | ESTs | 4.25 | 0.16 | upregulate stage |
| 415451 | H19415 | Hs.268720 | ESTs, Moderately similar to ALU1_HUMAN A | 4.1 | 0.15 | upregulate stage |
| 415462 | R52692 | Hs.12698 | ESTs | 4.65 | 0.11 | upregulate stage |
| 415496 | R37637 | Hs.12286 | ESTs | 5.4 | 0.13 | upregulate stage |
| 415509 | R40000 | Hs.91968 | ESTs | 1 | 0.44 | upregulate stage |
| 415511 | AI732617 | Hs.182362 | ESTs | 9.3 | 0.03 | upregulate stage |
| 415542 | R13474 | Hs.290263 | ESTs | 9.7 | 0.08 | upregulate stage |
| 415569 | Z43930 | | gb: HSC1OH121 normalized infant brain cDN | 1 | 0.74 | upregulate stage |
| 415600 | F12664 | | gb: HSC3CG021 normalized infant brain cDN | 1 | 0.43 | upregulate stage |
| 415616 | F12945 | Hs.12294 | ESTs | 1 | 1 | upregulate stage |
| 415626 | Z43847 | | gb: HSC1MC051 normalized infant brain cDN | 1 | 1 | upregulate stage |
| 415635 | F13168 | | gb: HSC3JF101 normalized infant brain cDN | 1 | 0.26 | upregulate stage |
| 415750 | AA167712 | | gb: zq39g08.s1 Stratagene hNT neuron (937 | 1 | 0.83 | upregulate stage |
| 415786 | AW419196 | Hs.257924 | Homo sapiens cDNA FLJ13782 fis, clone PL | 9 | 0.08 | upregulate stage |
| 415788 | AW628686 | Hs.78851 | KIAA0217 protein | 5.2 | 0.11 | upregulate stage |
| 415790 | R23574 | Hs.23545 | ESTs | 1 | 1 | upregulate stage |
| 415799 | AA653718 | Hs.225841 | DKFZP434D193 protein | 4.25 | 0.12 | upregulate stage |
| 415837 | H05279 | Hs.21758 | ESTs | 1 | 0.57 | upregulate stage |
| 415857 | AA866115 | Hs.301646 | Homo sapiens cDNA FLJ11381 fis, clone HE | 8.05 | 0.07 | upregulate stage |
| 415906 | AI751357 | Hs.288741 | Homo sapiens cDNA: FLJ22256 fis, clone H | 12.2 | 0.06 | upregulate stage |
| 415947 | U04045 | Hs.78934 | mutS (E. coli) homolog 2 (colon cancer, | 12.2 | 0.06 | upregulate stage |
| 415948 | AA262226 | | gb: zs24h06.r1 NCI_CGAP_GCB1 Homo sapiens | 1 | 1 | upregulate stage |
| 415979 | H16427 | Hs.271501 | ESTs | 4.85 | 0.13 | upregulate stage |
| 415989 | AI267700 | Hs.111128 | ESTs | 4.45 | 0.08 | upregulate stage |
| 416018 | AW138239 | Hs.78977 | proprotein convertase subtilisin/kexin t | 1 | 1 | upregulate stage |
| 416052 | R12816 | Hs.21164 | ESTs | 1.45 | 0.24 | upregulate stage |
| 416053 | H16359 | Hs.130648 | ESTs | 4.35 | 0.14 | upregulate stage |
| 416061 | R45516 | Hs.26119 | ESTs | 1 | 1 | upregulate stage |
| 416065 | BE267931 | Hs.78996 | proliferating cell nuclear antigen | 4.72 | 0.17 | upregulate stage |
| 416097 | BE387371 | Hs.301304 | Homo sapiens cDNA: FLJ21017 fis, clone C | 5.75 | 0.11 | upregulate stage |
| 416111 | AA033813 | Hs.79018 | chromatin assembly factor 1, subunit A ( | 8.4 | 0.09 | upregulate stage |
| 416135 | AW473656 | Hs.45119 | ESTs | 2.29 | 0.2 | upregulate stage |
| 416155 | AI807264 | Hs.205442 | ESTs, Weakly similar to AF117610 1 inner | 5.1 | 0.13 | upregulate stage |
| 416173 | R52782 | | gb: yg99d09.r1 Soares infant brain 1NIB H | 3.7 | 0.12 | upregulate stage |
| 416195 | AW131940 | Hs.104030 | ESTs | 1.1 | 0.16 | upregulate stage |
| 416196 | W51955 | Hs.73372 | ESTs | 3.25 | 0.14 | upregulate stage |
| 416203 | H27794 | Hs.269055 | ESTs | 1 | 0.32 | upregulate stage |
| 416209 | AA236776 | Hs.79078 | MAD2 (mitotic arrest deficient, yeast, h | 4.15 | 0.12 | upregulate stage |
| 416226 | N55342 | Hs.34372 | ESTs | 2.35 | 0.21 | upregulate stage |
| 416239 | AL038450 | Hs.48948 | ESTs | 4.05 | 0.14 | upregulate stage |
| 416241 | N52639 | Hs.32683 | ESTs | 5 | 0.09 | upregulate stage |
| 416254 | H51703 | Hs.13640 | ESTs | 1 | 0.95 | upregulate stage |
| 416269 | AA177138 | Hs.161671 | ESTs | 4.07 | 0.2 | upregulate stage |
| 416276 | U41060 | Hs.79136 | LIV-1 protein, estrogen regulated | 1.84 | 0.45 | upregulate stage |
| 416280 | H44180 | Ns. 181789 | ESTs | 1 | 1 | upregulate stage |
| 416309 | R84694 | Hs.79194 | cAMP responsive element binding protein | 9.35 | 0.08 | upregulate stage |
| 416324 | H47983 | Hs.1870 | phenylalanine hydroxylase | 5.15 | 0.13 | upregulate stage |
| 416332 | H91284 | Hs.244461 | ESTs | 1 | 1 | upregulate stage |
| 416343 | H49213 | | gb: yq19e04.r1 Soares fetal liver spleen | 1 | 1 | upregulate stage |
| 416353 | T77127 | Hs.191297 | ESTs, Moderately similar to ALU6_HUMAN A | 1.46 | 0.59 | upregulate stage |
| 416395 | R94575 | | gb: yt73e10.s1 Soares fetal liver spleen | 9.2 | 0.09 | upregulate stage |
| 416437 | N48990 | Hs.37204 | ESTs | 4.15 | 0.12 | upregulate stage |
| 416476 | H58137 | Hs.268639 | ESTs | 1 | 0.22 | upregulate stage |
| 416537 | T99086 | Hs.144904 | nuclear receptor co-repressor 1 | 5.45 | 0.12 | upregulate stage |
| 416539 | Y07909 | Hs.79368 | epithelial membrane protein 1 | 9.45 | 0.09 | upregulate stage |
| 416575 | W02414 | Hs.38383 | ESTs | 4.95 | 0.1 | upregulate stage |
| 416624 | H69044 | | gb: yr77h05.s1 Soares fetal liver spleen | 1 | 0.22 | upregulate stage |
| 416644 | H70701 | Hs.269135 | ESTs | 5.65 | 0.12 | upregulate stage |
| 416658 | U03272 | Hs.79432 | fibrillin 2 (congenital contractural ara | 9.65 | 0.05 | upregulate stage |
| 416682 | R99700 | Hs.36152 | ESTs | 1 | 0.25 | upregulate stage |
| 416690 | H84078 | Hs.108551 | ESTs | 5.35 | 0.13 | upregulate stage |
| 416709 | R99369 | Hs.283108 | hemoglobin, gamma G | 5.4 | 0.13 | upregulate stage |
| 416712 | N68576 | Hs.81602 | ESTs | 1 | 0.25 | upregulate stage |
| 416715 | H79460 | Hs.271722 | ESTs, Weakly similar to ALU1_HUMAN ALU S | 1 | 0.32 | upregulate stage |
| 416731 | T58115 | Hs.10336 | ESTs | 1 | 0.4 | upregulate stage |
| 416734 | H81213 | Hs.14825 | ESTs | 3.8 | 0.16 | upregulate stage |
| 416735 | R11275 | Hs.194485 | ESTs | 11.5 | 0.06 | upregulate stage |
| 416738 | N29218 | Hs.40290 | ESTs | 1 | 0.42 | upregulate stage |
| 416856 | N27833 | Hs.269028 | ESTs | 2.6 | 0.22 | upregulate stage |
| 416883 | AW140128 | Hs.184902 | ESTs | 11.3 | 0.07 | upregulate stage |
| 416923 | N32498 | Hs.42829 | ESTs | 1 | 0.61 | upregulate stage |
| 416936 | N21352 | Hs.42987 | ESTs, Weakly similar to ORF2 [M. musculus | 1 | 1 | upregulate stage |
| 417018 | M16038 | Hs.80887 | v-yes-1 Yamaguchi sarcoma viral related | 11.3 | 0.05 | upregulate stage |
| 417079 | U65590 | Hs.81134 | interleukin 1 receptor antagonist | 5.04 | 0.15 | upregulate stage |
| 417134 | N51220 | Hs.269068 | ESTs | 1 | 0.24 | upregulate stage |
| 417185 | NM_002484 | Hs.81469 | nucleotide binding protein 1 (E. coli Min | 1.98 | 0.32 | upregulate stage |
| 417218 | AA005247 | Hs.285754 | met proto-oncogene (hepatocyte growth fa | 2.95 | 0.21 | upregulate stage |
| 417265 | AL121369 | Hs.281117 | ESTs | 1 | 0.3 | upregulate stage |
| 417283 | N62840 | Hs.48648 | ESTs | 1.05 | 0.27 | upregulate stage |
| 417308 | H60720 | Hs.81892 | KIAA0101 gene product | 9.2 | 0.09 | upregulate stage |
| 417320 | AA195667 | Hs.287324 | ESTs | 2.8 | 0.16 | upregulate stage |
| 417396 | T98987 | | gb: ye66f02.r1 Soares fetal liver spleen | 1 | 1 | upregulate stage |
| 417404 | NM_007350 | Hs.82101 | pleckstrin homology-like domain, family | 2.75 | 0.09 | upregulate stage |
| 417409 | BE272506 | Hs.82109 | syndecan 1 | 1.92 | 0.44 | upregulate stage |
| 417448 | AA203135 | Hs.130186 | ESTs | 6.45 | 0.1 | upregulate stage |
| 417453 | H73183 | Hs.129885 | ESTs, Moderately similar to unnamed prot | 4.65 | 0.13 | upregulate stage |
| 417515 | L24203 | Hs.82237 | ataxia-telangiectasia group D-associated | 1.59 | 0.49 | upregulate stage |
| 417540 | AA203600 | Hs.152250 | ESTs | 1 | 1 | upregulate stage |
| 417576 | AA339449 | Hs.82285 | phosphoribosylglycinamide formyltransfer | 5.65 | 0.1 | upregulate stage |
| 417581 | R26968 | Hs.24104 | ESTs, Weakly similar to ALU7_HUMAN ALU S | 9.15 | 0.09 | upregulate stage |
| 417596 | R07343 | Hs.226823 | ESTs | 4.35 | 0.14 | upregulate stage |
| 417599 | AA204688 | Hs.136201 | ESTs, Weakly similar to ALU7_HUMAN ALU S | 0.94 | 0.9 | upregulate stage |
| 417620 | R02530 | Hs.191198 | ESTs | 9.1 | 0.07 | upregulate stage |
| 417638 | R12490 | Hs.189779 | ESTs | 1 | 0.32 | upregulate stage |
| 417650 | T05870 | Hs.100640 | ESTs | 1 | 0.22 | upregulate stage |
| 417715 | AW969587 | Hs.86366 | ESTs | 6.31 | 0.09 | upregulate stage |
| 417720 | AA205625 | Hs.208067 | ESTs | 4.65 | 0.11 | upregulate stage |
| 417742 | R64719 | | gb: EST22d11 WATM1 Homo sapiens cDNA clon | 4.15 | 0.13 | upregulate stage |
| 417750 | AI267720 | Hs.260523 | neuroblastoma RAS viral (v-ras) oncogene | 9.98 | 0.08 | upregulate stage |
| 417780 | Z43482 | Hs.82772 | collagen, type XI, alpha 1 | 2.3 | 0.14 | upregulate stage |
| 417789 | R50978 | Hs.267054 | ESTs | 1.05 | 0.19 | upregulate stage |
| 417791 | AW965339 | Hs.111471 | ESTs | 5.35 | 0.1 | upregulate stage |
| 417850 | AA215724 | Hs.82741 | primase, polypeptide 1 (49 kD) | 1 | 1 | upregulate stage |
| 417898 | AA826198 | Hs.291851 | ESTs | 2.15 | 0.21 | upregulate stage |
| 417975 | AA641836 | Hs.30085 | Homo sapiens cDNA: FLJ23186 fis, clone L | 3.7 | 0.13 | upregulate stage |
| 418004 | U37519 | Hs.87539 | aldehyde dehydrogenase 8 | 1.57 | 0.5 | upregulate stage |
| 418007 | M13509 | Hs.83169 | matrix metalloproteinase 1 (interstitial | 17.9 | 0.02 | upregulate stage |
| 418027 | AB037807 | Hs.83293 | hypothetical protein | 6.6 | 0.09 | upregulate stage |
| 418030 | BE207573 | Hs.83321 | neuromedin B | 12.2 | 0.04 | upregulate stage |
| 418068 | AW971155 | Hs.293902 | ESTs, Weakly similar to prolyl 4-hydroxy | 4.26 | 0.14 | upregulate stage |
| 418113 | AI272141 | Hs.83484 | SRY (sex determining region Y)-box 4 | 5.21 | 0.15 | upregulate stage |
| 418134 | AA397769 | Hs.86617 | ESTs | 1 | 0.3 | upregulate stage |
| 418153 | R13696 | Hs.112830 | ESTs | 1 | 0.3 | upregulate stage |
| 418180 | BE618087 | Hs.83724 | Human clone 23773 mRNA sequence | 8.79 | 0.09 | upregulate stage |
| 418201 | AA214345 | Hs.98445 | Homo sapiens cDNA: FLJ21652 fis, clone C | 3.75 | 0.13 | upregulate stage |
| 418203 | X54942 | Hs.83758 | CDC28 protein kinase 2 | 13.85 | 0.04 | upregulate stage |
| 418216 | AA662240 | Hs.283099 | AF15q14 protein | 9.75 | 0.07 | upregulate stage |
| 418236 | AW994005 | Hs.172572 | hypothetical protein FLJ20093 | 10.75 | 0.05 | upregulate stage |
| 418250 | U29926 | Hs.83918 | adenosine monophosphate deaminase (isofo | 6.25 | 0.12 | upregulate stage |
| 418259 | AA215404 | Hs.137289 | ESTs | 11.5 | 0.07 | upregulate stage |
| 418268 | AA810599 | Hs.86643 | ESTs | 1 | 0.43 | upregulate stage |
| 418296 | C01566 | Hs.86671 | ESTs | 1 | 0.45 | upregulate stage |
| 418372 | AA311833 | Hs.84318 | replication protein A1 (70 kD) | 9.04 | 0.08 | upregulate stage |
| 418379 | AA218940 | Hs.137516 | fidgetin-like 1 | 3.25 | 0.15 | upregulate stage |
| 418422 | AW440068 | Hs.59425 | Homo sapiens cDNA: FLJ23323 fis, clone H | 8.95 | 0.1 | upregulate stage |
| 418454 | AA315308 | | gb: EST187095 Colon carcinoma (HCC) cell | 2.5 | 0.15 | upregulate stage |
| 418462 | BE001596 | Hs.85266 | integrin, beta 4 | 1.33 | 0.59 | upregulate stage |
| 418469 | U34879 | Hs.85279 | hydroxysteroid (17-beta) dehydrogenase 1 | 1.21 | 0.71 | upregulate stage |
| 418478 | U38945 | Hs.1174 | cyclin-dependent kinase inhibitor 2A (me | 2.69 | 0.23 | upregulate stage |
| 418480 | AA223929 | Hs.86902 | ESTs | 1 | 1 | upregulate stage |
| 418498 | T78248 | | gh: yd79f05.r1 Soares fetal liver spleen | 1 | 0.47 | upregulate stage |
| 418516 | NM_006218 | Hs.85701 | phosphoinositide-3-kinase, catalytic, al | 5.4 | 0.14 | upregulate stage |
| 418546 | AA224827 | | gb: nc32g04.s1 NCI_CGAP_Pr2 Homo sapiens | 2.72 | 0.23 | upregulate stage |
| 418573 | AA225188 | | gb: nc21h04.r1 NCI_CGAP_Pr1 Homo sapiens | 9.95 | 0.07 | upregulate stage |
| 418577 | AA225247 | Hs.269300 | ESTs, Weakly similar to B34087 hypotheti | 1 | 0.77 | upregulate stage |
| 418578 | U92459 | Hs.86204 | glutamate receptor, metabotropic 8 | 1 | 1 | upregulate stage |
| 418590 | AI732672 | Hs.252507 | ESTs | 1 | 0.59 | upregulate stage |
| 418592 | X99226 | Hs.284153 | Fanconi anemia, complementation group A | 4.75 | 0.13 | upregulate stage |
| 418612 | AB037788 | Hs.224961 | cleavage and polyadenylation specific fa | 1 | 0.23 | upregulate stage |
| 418624 | AI734080 | Hs.104211 | ESTs | 7.95 | 0.09 | upregulate stage |
| 418661 | NM_001949 | Hs.1189 | Human mRNA for KIAA0075 gene, partial cd | 3 | 0.15 | upregulate stage |
| 418663 | AK001100 | Hs.87013 | Homo sapiens cDNA FLJ10238 fis, clone HE | 17.2 | 0.04 | upregulate stage |
| 418675 | AW299723 | Hs.87223 | bone morphogenetic protein receptor, typ | 1 | 1 | upregulate stage |
| 418686 | Z36830 | Hs.87268 | annexin A8 | 2.11 | 0.3 | upregulate stage |
| 418687 | R61650 | Hs.22581 | ESTs | 6.75 | 0.07 | upregulate stage |
| 418693 | AI750878 | Hs.87409 | thrombospondin 1 | 4.5 | 0.08 | upregulate stage |
| 418704 | AA227235 | Hs.83286 | ESTs | 1 | 0.33 | upregulate stage |
| 418712 | Z42183 | | gb: HSC0BF041 normalized infant brain cDN | 1 | 0.91 | upregulate stage |
| 418717 | AI334430 | Hs.86984 | ESTs | 4.7 | 0.12 | upregulate stage |
| 418723 | AA504428 | Hs.10487 | ESTs, Weakly similar to Weak similarity | 5.85 | 0.1 | upregulate stage |
| 418738 | AW388633 | Hs.6682 | ESTs | 3.6 | 0.09 | upregulate stage |
| 418752 | AL133556 | Hs.88144 | hypothetical protein FLJ12476 | 1 | 1 | upregulate stage |
| 418757 | AI864193 | Hs.169728 | Homo sapiens cDNA FLJ13150 fis, clone NT | 9.15 | 0.09 | upregulate stage |
| 418844 | M62982 | Hs.1200 | arachidonate 12-lipoxygenase | 9.25 | 0.08 | upregulate stage |
| 418867 | D31771 | Hs.89404 | msh (Drosophila) homo box homolog 2 | 1.83 | 0.43 | upregulate stage |
| 418876 | AA740616 | Hs.293874 | ESTs | 11.3 | 0.06 | upregulate stage |
| 418903 | AW969665 | Hs.154848 | ESTs | 1 | 1 | upregulate stage |
| 418915 | AI474778 | Hs.118977 | ESTs | 4.75 | 0.12 | upregulate stage |
| 418939 | AW630803 | Hs.89497 | lamin B1 | 2.6 | 0.13 | upregulate stage |
| 418945 | BE246762 | Hs.89499 | arachidonate 5-lipoxygenase | 1.45 | 0.53 | upregulate stage |
| 418976 | AA933082 | Hs.126883 | ESTs | 1 | 0.23 | upregulate stage |
| 419059 | T86216 | | gb: yd84a05.r1 Soares fetal liver spleen | 1 | 0.38 | upregulate stage |
| 419078 | M93119 | Hs.89584 | insulinoma-associated 1 | 1.25 | 0.18 | upregulate stage |
| 419121 | AA374372 | Hs.89626 | parathyroid hormone-like hormone | 1 | 1 | upregulate stage |
| 419169 | AW851980 | Hs.262346 | ESTs, Weakly similar to ORF2: function u | 1.59 | 0.3 | upregulate stage |
| 419183 | U60669 | Hs.89663 | cytochrome P450, subfamily XXIV (vitamin | 3.55 | 0.05 | upregulate stage |
| 419218 | AI248073 | Hs.188723 | ESTs, Weakly similar to ALU1_HUMAN ALU S | 1 | 0.27 | upregulate stage |
| 419226 | AI342491 | Hs.87413 | ESTs | 1 | 0.37 | upregulate stage |
| 419235 | AW470411 | Hs.288433 | neurotrimin | 11.9 | 0.07 | upregulate stage |
| 419286 | AA236005 | Hs.221303 | ESTs | 4.85 | 0.14 | upregulate stage |
| 419327 | AA521504 | Hs.190179 | ESTs | 1 | 1 | upregulate stage |
| 419355 | AA428520 | Hs.90061 | progesterone binding protein | 10.6 | 0.06 | upregulate stage |
| 419359 | AL043202 | Hs.90073 | chromosome segregation 1 (yeast homolog) | 1.84 | 0.47 | upregulate stage |
| 419413 | AA237040 | Hs.87589 | ESTs | 1 | 1 | upregulate stage |
| 419436 | AA991639 | Hs.15036 | ESTs, Highly similar to AF161358 1 HSPC0 | 6.6 | 0.1 | upregulate stage |
| 419452 | U33635 | Hs.90572 | PTK7 protein tyrosine kinase 7 | 1.31 | 0.64 | upregulate stage |
| 419472 | AW978038 | | gb: EST390147 MAGE resequences, MAGO Homo | 1 | 1 | upregulate stage |
| 419475 | AA243420 | Hs.87648 | ESTs | 1.1 | 0.24 | upregulate stage |
| 419477 | AA826279 | | gb: od03g07.s1 NCI_CGAP_GCB1 Homo sapiens | 1 | 0.56 | upregulate stage |
| 419484 | AA243474 | Hs.272128 | Homo sapiens cDNA FLJ13901 fis, clone TH | 1 | 0.22 | upregulate stage |
| 419506 | N20912 | Hs.42369 | ESTs | 1 | 1 | upregulate stage |
| 419554 | AI732138 | Hs.104318 | ESTs | 1 | 0.5 | upregulate stage |
| 419569 | AI971651 | Hs.91143 | jagged 1 (Alagille syndrome) | 1 | 0.91 | upregulate stage |
| 419594 | AA013051 | Hs.91417 | topoisomerase (DNA) II binding protein | 8.1 | 0.08 | upregulate stage |
| 419651 | NM_007023 | Hs.91971 | cAMP-regulated guanine nucleotide exchan | 1 | 1 | upregulate stage |
| 419666 | NM_014810 | Hs.92200 | KIAA0480 gene product | 5.2 | 0.12 | upregulate stage |
| 419737 | H24185 | Hs.92918 | hypothetical protein | 11.7 | 0.07 | upregulate stage |
| 419743 | AW408762 | Hs.127478 | ESTs | 6.1 | 0.09 | upregulate stage |
| 419752 | AA249573 | Hs.152618 | ESTs | 1.8 | 0.17 | upregulate stage |
| 419769 | H27374 | Hs.103483 | ESTs | 1 | 0.36 | upregulate stage |
| 419805 | AW966945 | | gb: EST379019 MAGE resequences, MAGJ Homo | 1 | 0.34 | upregulate stage |
| 419807 | R77402 | | gb: yi75f11.s1 Soares placenta Nb2HP Homo | 1 | 0.67 | upregulate stage |
| 419831 | AW448930 | Hs.5415 | ESTs | 7.05 | 0.1 | upregulate stage |
| 419833 | AA251131 | Hs.220697 | ESTs | 1.25 | 0.53 | upregulate stage |
| 419834 | AA251139 | | gb: zs03g12.s1 NCI_CGAP_GCB1 Homo sapiens | 1 | 1 | upregulate stage |
| 419923 | AW081455 | Hs.120219 | ESTs | 5.89 | 013 | upregulate stage |
| 419945 | AW290975 | Hs.118923 | ESTs | 1 | 0.24 | upregulate stage |
| 419962 | AA830111 | Hs.291917 | ESTs | 1 | 1 | upregulate stage |
| 419970 | AW612022 | Hs.263271 | ESTs | 9.15 | 0.09 | upregulate stage |
| 419986 | AI345455 | Hs.78915 | GA-binding protein transcription factor, | 3.05 | 0.17 | upregulate stage |
| 419998 | AA252691 | | gb: zs26d09.r1 NCI_CGAP_GCB1 Homo sapiens | 1 | 0.47 | upregulate stage |
| 420016 | AW016908 | Hs.88025 | ESTs | 1 | 0.8 | upregulate stage |
| 420047 | AI478658 | Hs.94631 | brefeldin A-inhibited guanine nucleotide | 4.8 | 0.11 | upregulate stage |
| 420076 | AA827860 | Hs.293717 | ESTs | 5.35 | 0.12 | upregulate stage |
| 420111 | AA255652 | | gb: zs21h11.r1 NCI_CGAP_GCB1 Homo sapiens | 5.3 | 0.11 | upregulate stage |
| 420145 | AA809860 | Hs.256284 | ESTs | 1 | 1 | upregulate stage |
| 420159 | AI572490 | Hs.99785 | Homo sapiens cDNA: FLJ21245 fis, clone C | 14.8 | 0.04 | upregulate stage |
| 420161 | AI683069 | Hs.175319 | ESTs | 4.7 | 0.11 | upregulate stage |
| 420184 | AA188408 | Hs.95665 | hypothetical protein | 4.35 | 0.15 | upregulate stage |
| 420226 | AA773709 | Hs.152818 | ubiquitin specific protease 8 | 3.1 | 0.16 | upregulate stage |
| 420230 | AL034344 | Hs.298020 | Homo sapiens cDNA FLJ11796 fis, clone HE | 10.35 | 0.06 | upregulate stage |
| 420236 | AA256763 | Hs.291111 | ESTs | 4.45 | 0.14 | upregulate stage |
| 420270 | AA257990 | | gh: zs35h07.r1 NCI_CGAP_GCB1 Homo sapiens | 10.05 | 0.08 | upregulate stage |
| 420297 | AI628272 | Hs.88323 | ESTs | 9.45 | 0.09 | upregulate stage |
| 420344 | BE463721 | Hs.97101 | putative G protein-coupled receptor | 11.7 | 0.05 | upregulate stage |
| 420392 | AI242930 | Hs.97393 | KIAA0328 protein | 1.7 | 0.22 | upregulate stage |
| 420413 | AW971624 | Hs.120605 | ESTs | 1 | 1 | upregulate stage |
| 420445 | AA262213 | Hs.193514 | ESTs | 1 | 1 | upregulate stage |
| 420471 | AA262452 | Hs.192268 | ESTs | 3.95 | 0.13 | upregulate stage |
| 420479 | AW183695 | Hs.186572 | ESTs | 4.95 | 0.12 | upregulate stage |
| 420493 | AI635113 | Hs.270366 | Homo sapiens mRNA; cDNA DKFZp564H0616 (f | 4.4 | 0.15 | upregulate stage |
| 420552 | AK000492 | Hs.98806 | hypothetical protein | 11.55 | 0.06 | upregulate stage |
| 420572 | AL035593 | Hs.99016 | Human DNA sequence from clone 310J6 on c | 1.35 | 0.22 | upregulate stage |
| 420643 | W87731 | | gb: zh65g10.r1 Soares_fetal_liver_spleen_{—} | 1.25 | 0.25 | upregulate stage |
| 420650 | AA455706 | Hs.44581 | heat shock protein hsp70-related protein | 7.3 | 0.09 | upregulate stage |
| 420654 | AA279091 | Hs.104420 | ESTs | 1 | 0.27 | upregulate stage |
| 420655 | R74405 | Hs.300886 | ESTs | 1 | 1 | upregulate stage |
| 420717 | AA284447 | Hs.271887 | ESTs | 9 | 0.09 | upregulate stage |
| 420734 | AW972872 | Hs.293736 | ESTs | 5.2 | 0.13 | upregulate stage |
| 420756 | AA411800 | Hs.189900 | ESTs | 1 | 1 | upregulate stage |
| 420789 | AI670057 | Hs.199882 | ESTs | 8.85 | 0.06 | upregulate stage |
| 420802 | U22376 | Hs.1334 | v-myb avian myeloblastosis viral oncogen | 4.6 | 0.12 | upregulate stage |
| 420851 | AA281062 | Hs.250734 | ESTs | 8.35 | 0.08 | upregulate stage |
| 420880 | AI809621 | Hs.105620 | ESTs | 1 | 1 | upregulate stage |
| 420923 | AF097021 | Hs.273321 | differentially expressed in hematopoieti | 10.4 | 0.03 | upregulate stage |
| 420928 | AA281809 | | gb: zt10e01.r1 NCI_CGAP_GCB1 Homo sapiens | 1 | 1 | upregulate stage |
| 420936 | AA456112 | Hs.99410 | ESTs | 8.71 | 0.07 | upregulate stage |
| 420947 | AA491044 | Hs.47196 | ESTs | 1 | 0.38 | upregulate stage |
| 421017 | AW979181 | Hs.293221 | ESTs, Weakly similar to ALU1_HUMAN ALU S | 1 | 1 | upregulate stage |
| 421064 | AI245432 | Hs.101382 | tumor necrosis factor, alpha-induced pro | 1.26 | 0.62 | upregulate stage |
| 421070 | AA283185 | Hs.19327 | ESTs | 2.2 | 0.14 | upregulate stage |
| 421100 | AW351839 | Hs.124660 | Homo sapiens cDNA: FLJ21763 fis, clone C | 1.69 | 0.28 | upregulate stage |
| 421102 | AI470093 | Hs.89217 | ESTs | 2.65 | 0.19 | upregulate stage |
| 421103 | AI625835 | Hs.27104 | ESTs | 6 | 0.1 | upregulate stage |
| 421114 | AW975051 | Hs.293156 | ESTs | 4.7 | 0.12 | upregulate stage |
| 421118 | AI471925 | Hs.89257 | ESTs | 1 | 0.39 | upregulate stage |
| 421155 | H87879 | Hs.102267 | lysyl oxidase | 1.15 | 0.18 | upregulate stage |
| 421159 | AW978316 | Hs.136649 | ESTs | 1 | 0.44 | upregulate stage |
| 421187 | NM_014721 | Hs.102471 | KIAA0680 gene product | 5.7 | 0.11 | upregulate stage |
| 421218 | NM_000499 | Hs.72912 | cytochrome P450, subfamily I (aromatic c | 0.07 | 2.55 | upregulate stage |
| 421221 | AW276914 | Hs.300877 | ESTs | 8.75 | 0.07 | upregulate stage |
| 421229 | AI056590 | Hs.7086 | Homo sapiens cDNA: FLJ23000 fis, clone L | 1.64 | 0.49 | upregulate stage |
| 421261 | AA600853 | Hs.98133 | ESTs | 10.9 | 0.07 | upregulate stage |
| 421262 | AA286746 | Hs.9343 | Homo sapiens cDNA FLJ14265 fis, clone PL | 2.65 | 0.16 | upregulate stage |
| 421278 | AI367919 | Hs.99691 | ESTs | 1 | 0.56 | upregulate stage |
| 421280 | AA811804 | | gb: ob39a05.s1 NCI_CGAP_GCB1 Homo sapiens | 1 | 0.34 | upregulate stage |
| 421282 | AA286914 | Hs.183299 | ESTs | 9 | 0.08 | upregulate stage |
| 421306 | AA806207 | Hs.125889 | ESTs | 1 | 0.95 | upregulate stage |
| 421308 | AA687322 | Hs.192843 | ESTs | 2.85 | 0.15 | upregulate stage |
| 421373 | AA808229 | Hs.167771 | ESTs | 2.45 | 0.14 | upregulate stage |
| 421379 | Y15221 | Hs.103982 | small inducible cytokine subfamily B (Cy | 1.6 | 0.26 | upregulate stage |
| 421381 | AA361752 | | gb: EST71314 T-cell lymphoma Homo sapiens | 5.05 | 0.09 | upregulate stage |
| 421418 | AA806639 | | gb: obB8g05.s1 NCI_CGAP_GCB1 Homo sapiens | 6.55 | 0.1 | upregulate stage |
| 421433 | AI829192 | Hs.134805 | ESTs | 9.9 | 0.07 | upregulate stage |
| 421451 | AA291377 | Hs.50831 | ESTs | 11.9 | 0.06 | upregulate stage |
| 421491 | H99999 | Hs.42736 | ESTs | 3 | 0.2 | upregulate stage |
| 421493 | BE300341 | Hs.104925 | ectodermal-neural cortex (with BTB-like | 2.51 | 0.32 | upregulate stage |
| 421559 | NM_014720 | Hs.105751 | Ste20-related serine/threonine kinase | 9 | 0.09 | upregulate stage |
| 421577 | BE465451 | Hs.105925 | single-minded (Drosophila) homolog 1 | 5.75 | 0.12 | upregulate stage |
| 421673 | H54384 | Hs.36892 | ESTs | 1 | 1 | upregulate stage |
| 421685 | AF189723 | Hs.106778 | ATPase, Ca++ transporting, type 2C, memb | 9.45 | 0.07 | upregulate stage |
| 421708 | AW754341 | | gb: CM0-CT0341-181299-130-h12 CT0341 Homo | 1 | 0.47 | upregulate stage |
| 421733 | AL119671 | Hs.1420 | fibroblast growth factor receptor 3 (ach | 1.97 | 0.33 | upregulate stage |
| 421838 | AW881089 | Hs.108806 | Homo sapiens mRNA; cDNA DKFZp566M0947 (f | 7.05 | 0.1 | upregulate stage |
| 421869 | AB003592 | Hs.109050 | contactin 6 | 1 | 1 | upregulate stage |
| 421925 | S80310 | Hs.109620 | acidic epididymal glycoprotein-like 1 | 1 | 1 | upregulate stage |
| 421948 | L42583 | Hs.111758 | keratin 6A | 51.9 | 0.01 | upregulate stage |
| 421958 | AA357185 | Hs.109918 | ras homolog gene family, member H | 10.17 | 0.07 | upregulate stage |
| 421991 | NM_014918 | Hs.110488 | KIAA0990 protein | 4.5 | 0.17 | upregulate stage |
| 422026 | U80736 | Hs.110826 | trinucleotide repeat containing 9 | 6.5 | 0.08 | upregulate stage |
| 422072 | AB018255 | Hs.111138 | KIAA0712 gene product | 9.2 | 0.08 | upregulate stage |
| 422094 | AF129535 | Hs.272027 | F-box only protein 5 | 6.95 | 0.09 | upregulate stage |
| 422158 | L10343 | Hs.112341 | protease inhibitor 3, skin-derived (SKAL | 1.66 | 0.17 | upregulate stage |
| 422168 | AA586894 | Hs.112408 | S100 calcium-binding protein A7 (psorias | 3.96 | 0.1 | upregulate stage |
| 422182 | AL043892 | Hs.180582 | Homo sapiens cDNA: FLJ21836 fis, clone H | 2.8 | 0.16 | upregulate stage |
| 422204 | AA339015 | | gb: EST44247 Fetal brain I Homo sapiens c | 1 | 1 | upregulate stage |
| 422261 | AA307595 | Hs.119908 | nucleolar protein NOP5/NOP58 | 1 | 1 | upregulate stage |
| 422271 | AB038995 | Hs.114159 | RAB-8b protein | 5.04 | 0.16 | upregulate stage |
| 422278 | AF072873 | Hs.114218 | frizzled (Drosophila) homolog 6 | 3.46 | 0.24 | upregulate stage |
| 422282 | AF019225 | Hs.114309 | apolipoprotein L | 4.54 | 0.14 | upregulate stage |
| 422322 | AB022192 | Hs.115240 | peroxisome biogenesis factor 13 | 1 | 0.53 | upregulate stage |
| 422330 | D30783 | Hs.115263 | epiregulin | 4.45 | 0.06 | upregulate stage |
| 422342 | AA309272 | | gb: EST180209 Liver, hepatocellular carci | 2.25 | 0.19 | upregulate stage |
| 422406 | AF025441 | Hs.116206 | Opa-interacting protein 5 | 9.5 | 0.07 | upregulate stage |
| 422487 | AJ010901 | Hs.198267 | mucin 4, tracheobronchial | 7.35 | 0.04 | upregulate stage |
| 422491 | AA338548 | Hs.117546 | neuronatin | 0.64 | 1.24 | upregulate stage |
| 422504 | AA311407 | | gb: EST182167 Jurkat T-cells V Homo sapie | 3.6 | 0.11 | upregulate stage |
| 422505 | AL120862 | Hs.124165 | ESTs | 2.8 | 0.14 | upregulate stage |
| 422508 | AJ000327 | Hs.117852 | ATP-binding cassette, sub-family D (ALD) | 5.25 | 0.14 | upregulate stage |
| 422530 | AW972300 | Hs.118110 | bone marrow stromal cell antigen 2 | 2.57 | 0.31 | upregulate stage |
| 422540 | AI050751 | Hs.22895 | Homo sapiens cDNA: FLJ23548 fis, clone L | 1 | 0.59 | upregulate stage |
| 422588 | AA312730 | | gb: EST183651 Monocytes, stimulated II Ho | 3 | 0.14 | upregulate stage |
| 422678 | AA247778 | Hs.119155 | Homo sapiens mRNA; cDNA DKFZp434B249 (fr | 10.7 | 0.07 | upregulate stage |
| 422762 | AL031320 | Hs.119976 | Human DNA sequence from clone RP1-20N2 o | 5.1 | 0.13 | upregulate stage |
| 422809 | AK001379 | Hs.121028 | hypothetical protein FLJ10549 | 5.94 | 0.1 | upregulate stage |
| 422823 | D89974 | Hs.121102 | vanin 2 | 10 | 0.07 | upregulate stage |
| 422892 | AA988176 | Hs.121553 | hypothetical protein FLJ20641 | 1 | 0.27 | upregulate stage |
| 422938 | NM_001809 | Hs.1594 | centromere protein A (17 kD) | 7.2 | 0.08 | upregulate stage |
| 422964 | AW439476 | Hs.256895 | ESTs | 11.75 | 0.07 | upregulate stage |
| 422981 | AF026445 | Hs.122752 | TATA box binding protein (TBP)-associate | 3.05 | 0.14 | upregulate stage |
| 423001 | AA320014 | Hs.208603 | ESTs | 9.1 | 0.09 | upregulate stage |
| 423090 | BE387529 | Hs.123536 | melanoma antigen, family E, 1, cancer/te | 1 | 0.49 | upregulate stage |
| 423100 | AA323114 | | gb: EST25873 Cerebellum II Homo sapiens c | 1 | 1 | upregulate stage |
| 423121 | AW864848 | | gb: PM2-SN0018-290300-003-c09 SN0018 Homo | 2.8 | 0.19 | upregulate stage |
| 423156 | AA131493 | Hs.124752 | fibroblast growth factor 12B | 1 | 0.27 | upregulate stage |
| 423198 | M81933 | Hs.1634 | cell division cycle 25A | 8.95 | 0.07 | upregulate stage |
| 423217 | NM_000094 | Hs.1640 | collagen, type VII, alpha 1 (epidermolys | 1.2 | 0.57 | upregulate stage |
| 423262 | NM_005479 | Hs.126057 | frequently rearranged in advanced T-cell | 9.75 | 0.07 | upregulate stage |
| 423296 | AW957193 | Hs.3327 | Homo sapiens cDNA: FLJ22219 fis, clone H | 4.95 | 0.12 | upregulate stage |
| 423309 | BE006775 | Hs.126782 | sushi-repeat protein | 1.58 | 0.34 | upregulate stage |
| 423347 | AI660412 | Hs.234557 | ESTs | 1 | 0.45 | upregulate stage |
| 423359 | NM_014170 | Hs.127496 | HSPC135 protein | 1 | 0.69 | upregulate stage |
| 423368 | AA364195 | | gb: EST75015 Pineal gland II Homo sapiens | 1 | 0.95 | upregulate stage |
| 423389 | AI471609 | Hs.54347 | ESTs | 3.95 | 0.14 | upregulate stage |
| 423430 | AF112481 | Hs.128501 | RAD54, S. cerivisiae, homolog of, B | 1.62 | 0.43 | upregulate stage |
| 423441 | R68649 | Hs.278359 | absent in melanoma 1 like | 6.25 | 0.1 | upregulate stage |
| 423453 | AW450737 | Hs.128791 | CGI-09 protein | 8.45 | 0.09 | upregulate stage |
| 423500 | AF020763 | Hs.129705 | clone 1900 unknown protein | 1 | 0.8 | upregulate stage |
| 423578 | AW960454 | Hs.222830 | ESTs | 11.94 | 0.07 | upregulate stage |
| 423629 | AW021173 | Hs.18612 | Homo sapiens cDNA: FLJ21909 fis, clone H | 3.4 | 0.17 | upregulate stage |
| 423632 | AA328824 | | gb: EST32358 Embryo, 12 week I Homo sapie | 1 | 0.71 | upregulate stage |
| 423642 | AW452650 | Hs.157148 | Homo sapiens cDNA FLJ11883 fis, clone HE | 8.35 | 0.1 | upregulate stage |
| 423644 | AA4329048 | | gb: EST32875 Embryo, 12 week I Homo sapie | 1 | 0.43 | upregulate stage |
| 423648 | AK000456 | Hs.130546 | hypothetical protein FLJ20449 | 10.4 | 0.07 | upregulate stage |
| 423651 | AF192913 | Hs.130683 | zinc finger protein 180 (HHZ168) | 5.75 | 0.1 | upregulate stage |
| 423654 | AI674253 | Hs.35828 | ESTs | 3.15 | 0.18 | upregulate stage |
| 423673 | BE003054 | Hs.1695 | matrix metalloproteinase 12 (macrophage | 29.7 | 0.02 | upregulate stage |
| 423725 | AJ403108 | Hs.132127 | hypothetical protein LOC57822 | 4.1 | 0.16 | upregulate stage |
| 423745 | AI809797 | Hs.43222 | ESTs | 1 | 0.5 | upregulate stage |
| 423748 | AI149048 | Hs.30211 | hypothetical protein FLJ22313 | 4.25 | 0.13 | upregulate stage |
| 423753 | Y11312 | Hs.132463 | phosphoinositide-3-kinase, class 2, beta | 1.18 | 0.71 | upregulate stage |
| 423758 | AA338153 | Hs.82124 | laminin, beta 1 | 1 | 1 | upregulate stage |
| 423774 | L39064 | Hs.1702 | interleukin 9 receptor | 3.08 | 0.15 | upregulate stage |
| 423818 | AA332439 | | gb: EST36554 Embryo, 8 week I Homo sapien | 1 | 0.38 | upregulate stage |
| 423827 | AI472828 | Hs.172625 | ESTs | 1 | 0.43 | upregulate stage |
| 423837 | AW937063 | | gb: PM3-DT0037-231299-001-g11 DT0037 Homo | 1.44 | 0.55 | upregulate stage |
| 423912 | BE091233 | | gb: PM0-BT0726-300300-001-H07 BT0726 Homo | 1 | 1 | upregulate stage |
| 423938 | AL049328 | Hs.135642 | Homo sapiens mRNA; cDNA DKFZp564E026 (fr | 1 | 1 | upregulate stage |
| 423942 | AF209704 | Hs.135723 | glycolipid transfer protein | 11.65 | 0.05 | upregulate stage |
| 423944 | T91433 | Hs.128291 | phesphodiesterase 10A | 1 | 0.45 | upregulate stage |
| 423946 | AL137344 | Hs.135892 | Homo sapiens mRNA; cDNA DKFZp76101311 (f | 1 | 1 | upregulate stage |
| 423956 | W28203 | Hs.136169 | Homo sapiens clone 25215 mRNA sequence, | 5.35 | 0.09 | upregulate stage |
| 424006 | AF054815 | Hs.137548 | CD84 antigen (leukocyte antigen) | 8.8 | 0.06 | upregulate stage |
| 424008 | R02740 | Hs.137555 | putative chemokine receptor; GTP-binding | 3.14 | 0.19 | upregulate stage |
| 424012 | AW368377 | Hs.137569 | tumor protein 63 kDa with strong homolog | 2.6 | 0.26 | upregulate stage |
| 424073 | U03493 | Hs.138959 | gap junction protein, alpha 7, 45 kD (con | 1.8 | 0.22 | upregulate stage |
| 424075 | AI807320 | Hs.227630 | RE1-silencing transcription factor | 9.1 | 0.06 | upregulate stage |
| 424087 | N69333 | Hs.21638 | ESTs | 1 | 1 | upregulate stage |
| 424193 | AK002005 | Hs.142868 | Homo sapiens cDNA FLJ11143 fis, clone PL | 1 | 0.23 | upregulate stage |
| 424353 | AA339646 | | gb: EST44755 Fetal brain I Home sapiens c | 1 | 1 | upregulate stage |
| 424364 | AW383226 | Hs.201189 | ESTs, Weakly similar to DRPLA [H. sapiens | 2.18 | 0.33 | upregulate stage |
| 424406 | D54120 | Hs.146409 | wingless-type MMTV integration site fami | 2.05 | 0.17 | upregulate stage |
| 424420 | BE614743 | Hs.146688 | prostaglandin E synthase | 1.19 | 0.67 | upregulate stage |
| 424425 | AB031480 | Hs.146824 | SPR1 protein | 1.42 | 0.54 | upregulate stage |
| 424486 | BE002477 | Hs.278714 | chloride intracellelar channel 6 | 1 | 0.27 | upregulate stage |
| 424490 | AJ278016 | Hs.55565 | ankyrin repeat domain 3 | 2.02 | 0.39 | upregulate stage |
| 424492 | AI133482 | Hs.165210 | ESTs | 3.15 | 0.14 | upregulate stage |
| 424505 | AA446131 | Hs.124918 | Homo sapiens cDNA FLJ13186 fis, close NT | 11.55 | 0.05 | upregulate stage |
| 424513 | BE385864 | Hs.149894 | mitochondrial translational initiation f | 2.65 | 0.23 | upregulate stage |
| 424575 | AL110217 | Hs.150751 | DKFZP572C163 protein | 1 | 1 | upregulate stage |
| 424583 | AF017445 | Hs.150926 | fucose-1-phosphate guanylyltransferase | 1.8 | 0.26 | upregulate stage |
| 424589 | AW854298 | | gb: RC3-CT0254-100500-211-c03 CT0254 Homo | 0.85 | 0.94 | upregulate stage |
| 424602 | AK002055 | Hs.301129 | Homo sapiens clone 23859 mRNA sequence | 2.85 | 0.2 | upregulate stage |
| 424625 | AW904466 | Hs.151310 | PDZ domain protein (Drosophila inaD-like | 1 | 0.4 | upregulate stage |
| 424629 | M90656 | Hs.151393 | glutamate-cysteine ligase, catalytic sub | 1.41 | 0.52 | upregulate stage |
| 424643 | AF241850 | Hs.151428 | ret finger protein 2 | 9.75 | 0.07 | upregulate stage |
| 424649 | BE242035 | Hs.151461 | embryonic ectoderm development | 5.85 | 0.13 | upregulate stage |
| 424653 | AW977534 | Hs.151469 | calcium/calmodulin-dependent serine prot | 1 | 0.56 | upregulate stage |
| 424670 | W61215 | Hs.116651 | epithelial V-like antigen 1 | 1.42 | 0.52 | upregulate stage |
| 424690 | BE538356 | Hs.151777 | Human translation initiation factor elF- | 4.3 | 0.1 | upregulate stage |
| 424701 | NM_005923 | Hs.151988 | mitogen-activated protein kinase kinase | 3.85 | 0.11 | upregulate stage |
| 424702 | AF250237 | Hs.152009 | G protein-coupled receptor 85 | 1 | 1 | upregulate stage |
| 424717 | H03754 | Hs.152213 | wingless-type MMTV integration site fami | 4.05 | 0.09 | upregulate stage |
| 424735 | U31875 | Hs.152677 | Homo sapiens cDNA FLJ20338 fis, clone HE | 1.04 | 0.59 | upregulate stage |
| 424736 | AF230877 | Hs.152701 | microtubule-interacting protein that ass | 1.11 | 0.65 | upregulate stage |
| 424749 | NM_002451 | Hs.152817 | methylthioadenosine phosphorylase | 1 | 1 | upregulate stage |
| 424834 | AK001432 | Hs.153408 | Homo sapiens cDNA FLJ10570 fis, clone NT | 18.5 | 0.03 | upregulate stage |
| 424841 | AI280215 | Hs.96885 | ESTs | 1 | 1 | upregulate stage |
| 424860 | W60828 | Hs.153529 | Homo sapiens clone 24540 mRNA sequence | 1 | 1 | upregulate stage |
| 424878 | H57111 | Hs.221132 | ESTs | 9.45 | 0.07 | upregulate stage |
| 424879 | AA348013 | Hs.159354 | ESTs | 10.7 | 0.07 | upregulate stage |
| 424888 | AA348126 | Hs.24882 | ESTs | 2.8 | 0.21 | upregulate stage |
| 424905 | NM_002497 | Hs.153704 | NIMA (never in mitosis gene a)-related k | 7.75 | 0.07 | upregulate stage |
| 424930 | AA885344 | Hs.96910 | ESTs | 1.45 | 0.38 | upregulate stage |
| 424948 | AA348810 | Hs.190503 | ESTs | 3.2 | 0.12 | upregulate stage |
| 424951 | AW964082 | | gb: EST376155 MAGE resequences, MAGH Homo | 8.75 | 0.09 | upregulate stage |
| 424993 | F07625 | | gb: HSC2CF021 normalized infant brain cDN | 1 | 1 | upregulate stage |
| 425020 | U09368 | Hs.154205 | zinc finger protein 140 (clone pHZ-39) | 1 | 1 | upregulate stage |
| 425024 | R39235 | Hs.12407 | ESTs | 2.65 | 0.13 | upregulate stage |
| 425057 | AA826434 | Hs.96944 | ESTs | 1 | 0.22 | upregulate stage |
| 425068 | AL048716 | Hs.154387 | KIAA0103 gene product | 9.5 | 0.07 | upregulate stage |
| 425081 | X74794 | Hs.154443 | minichromosome maintenance deficient (S. | 1.66 | 0.52 | upregulate stage |
| 425191 | AF052146 | Hs.155085 | Homo sapiens clone 24653 mRNA sequence | 1 | 0.32 | upregulate stage |
| 425216 | U81504 | Hs.155172 | adaptor-related protein complex 3, beta | 7.05 | 0.1 | upregulate stage |
| 425234 | AW152225 | Hs.165909 | ESTs | 19.7 | 0.04 | upregulate stage |
| 425239 | BE567924 | Hs.155244 | pre-mRNA splicing factor similar to S. c | 1 | 0.69 | upregulate stage |
| 425289 | AW139342 | Hs.155530 | interferon, gamma-inducible protein 16 | 10.45 | 0.05 | upregulate stage |
| 425304 | AA463844 | Hs.31339 | fibroblast growth factor 11 | 1.57 | 0.51 | upregulate stage |
| 425316 | AA354977 | Hs.191565 | ESTs, Moderately similar to NSD1 protein | 5.05 | 0.12 | upregulate stage |
| 425322 | U63630 | Hs.155637 | protein kinase, DNA-activated, catalytic | 14.7 | 0.05 | upregulate stage |
| 425362 | AA355936 | | gb: EST64410 Jurkat T-cells VI Homo sapie | 1 | 1 | upregulate stage |
| 425397 | J04088 | Hs.156346 | topoisomerase (DNA) II alpha (170 kD) | 8.24 | 0.09 | upregulate stage |
| 425403 | AL023753 | Hs.156406 | Human DNA sequence from clone 1198H6 on | 1 | 0.22 | upregulate stage |
| 425415 | M13903 | Hs.157091 | involucrin | 1.19 | 0.55 | upregulate stage |
| 425420 | BE536911 | Hs.234545 | ESTs, Weakly similar to AF155135 1 novel | 2.85 | 0.13 | upregulate stage |
| 425463 | AK000740 | Hs.157986 | hypothetical protein FLJ20733 | 9 | 0.07 | upregulate stage |
| 425465 | L18964 | Hs.1904 | protein kinase C, iota | 9.6 | 0.07 | upregulate stage |
| 425467 | R16484 | Hs.190075 | ESTs | 1 | 0.83 | upregulate stage |
| 425492 | AL021918 | Hs.158174 | zinc finger protein 184 (Kruppel-like) | 3.2 | 0.15 | upregulate stage |
| 425607 | U09860 | Hs.158333 | protease, serine, 7 (enterokinase) | 1 | 1 | upregulate stage |
| 425608 | AA360486 | Hs.92448 | ESTs | 4.7 | 0.14 | upregulate stage |
| 425614 | AI334963 | Hs.156256 | ESTs | 2.65 | 0.14 | upregulate stage |
| 425641 | D79758 | Hs.14355 | Homo sapiens cDNA FLJ13207 fis, clone NT | 4.86 | 0.1 | upregulate stage |
| 425660 | AA521184 | Hs.105504 | ESTs | 1 | 0.31 | upregulate stage |
| 425665 | AK001050 | Hs.159066 | hypothetical protein FLJ10188 | 1.25 | 0.19 | upregulate stage |
| 425672 | AA361483 | | gb: EST70790 T-cell lymphoma Homo sapiens | 1 | 1 | upregulate stage |
| 425707 | AF115402 | Hs.11713 | E74-like factor 5 (ets domain transcript | 3.96 | 0.13 | upregulate stage |
| 425726 | AF085808 | Hs.159330 | uroplakin 3 | 0.92 | 0.79 | upregulate stage |
| 425742 | AJ001454 | Hs.159425 | testican 3 | 1 | 1 | upregulate stage |
| 425785 | T27017 | Hs.159528 | Homo sapiens clone 24400 mRNA sequence | 1 | 0.39 | upregulate stage |
| 425811 | AL039104 | Hs.159557 | karyopherin alpha 2 (RAG cohort 1, impor | 1.89 | 0.44 | upregulate stage |
| 425843 | BE313280 | Hs.159627 | death associated protein 3 | 3.1 | 0.15 | upregulate stage |
| 425852 | AK001504 | Hs.159651 | death receptor 6 | 1.72 | 0.47 | upregulate stage |
| 425883 | AL137708 | Hs.161031 | Homo sapiens mRNA; cDNA DKFZp434K0322 (f | 0.95 | 0.68 | upregulate stage |
| 426010 | AA136563 | Hs.1975 | Homo sapiens cDNA: FLJ21007 fis, clone C | 1 | 0.34 | upregulate stage |
| 426028 | NM_001110 | Hs.172028 | a disintegrin and metalloproteinase doma | 14.3 | 0.04 | upregulate stage |
| 426101 | AL049987 | Hs.166361 | Homo sapiens mRNA; cDNA DKFZp564F112 (fr | 11.75 | 0.05 | upregulate stage |
| 426108 | AA622037 | Hs.166468 | programmed cell death 5 | 3.23 | 0.18 | upregulate stage |
| 426115 | H08895 | Hs.166733 | leucyl/cystinyl aminopeptidase | 1 | 0.32 | upregulate stage |
| 426168 | NM_003152 | Hs.167503 | signal transducer and activator of trans | 1.97 | 0.4 | upregulate stage |
| 426257 | AL137201 | Hs.168625 | KIAA0979 protein | 1 | 0.29 | upregulate stage |
| 426261 | AW242243 | Hs.168670 | peroxisomal farnesylated protein | 2.8 | 0.16 | upregulate stage |
| 426283 | NM_003937 | Hs.169139 | kynureninase (L-kynurenine hydrolase) | 14.75 | 0.04 | upregulate stage |
| 426451 | AI908165 | Hs.169946 | GATA-binding protein 3 | 3.05 | 0.28 | upregulate stage |
| 426462 | U59111 | Hs.169993 | dermatan sulphate proteoglycan 3 | 1 | 0.36 | upregulate stage |
| 426490 | NM_001621 | Hs.170087 | aryl hydrocarbon receptor | 14.17 | 0.05 | upregulate stage |
| 426514 | BE616633 | Hs.301122 | bone morphogenetic protein 7 (osteogenic | 1.15 | 0.47 | upregulate stage |
| 426561 | AA381437 | | gb: EST94514 Activated T-cells I Homo sap | 5.65 | 0.11 | upregulate stage |
| 426711 | AA383471 | Hs.180669 | conserved gene amplified in osteosarcoma | 11.05 | 0.05 | upregulate stage |
| 426731 | AW303411 | Hs.130332 | ESTs | 2.4 | 0.21 | upregulate stage |
| 426759 | AI590401 | Hs.21213 | ESTs | 9.5 | 0.06 | upregulate stage |
| 426786 | AA319798 | Hs.172247 | eukaryotic translation elongation factor | 9.25 | 0.09 | upregulate stage |
| 426788 | U66615 | Hs.172280 | SWI/SNF related, matrix associated, acti | 5.63 | 0.14 | upregulate stage |
| 426818 | AA554827 | Hs.124841 | ESTs, Weakly similar to ALU5_HUMAN ALU S | 9 | 0.08 | upregulate stage |
| 426824 | D87717 | Hs.172652 | KIAA0013 gene product | 1 | 0.87 | upregulate stage |
| 426827 | AW067805 | Hs.172665 | methylenetetrahydrofolate dehydrogenase | 8.95 | 0.09 | upregulate stage |
| 426921 | AA037145 | Hs.172865 | cleavage stimulates factor, 3′ pre-RNA, | 1 | 0.19 | upregulate stage |
| 426935 | NM_000088 | Hs.172928 | collagen, type I, alpha 1 | 1.15 | 0.72 | upregulate stage |
| 426997 | BE620738 | Hs.173125 | peptidylprolyl isomerase F (cyclophilin | 11.06 | 0.06 | upregulate stage |
| 427071 | AA397958 | Hs.192719 | ESTs | 5.75 | 0.08 | upregulate stage |
| 427126 | AA620613 | Hs.191827 | ESTs | 2.55 | 0.18 | upregulate stage |
| 427134 | AA398409 | Hs.173561 | EST | 3.4 | 0.18 | upregulate stage |
| 427142 | AA398510 | Hs.133148 | ESTs | 1 | 0.25 | upregulate stage |
| 427259 | AA400096 | | gb: zu69f07.s1 Soares_testis_NHT Home sap | 1 | 0.22 | upregulate stage |
| 427308 | D26067 | Hs.174905 | KIAA0033 protein | 5.9 | 0.1 | upregulate stage |
| 427315 | AA179949 | Hs.175563 | Home sapiens mRNA; cDNA DKFZp564N0763 (7 | 6.12 | 0.11 | upregulate stage |
| 427356 | AW023482 | Hs.97849 | ESTs | 2.7 | 0.13 | upregulate stage |
| 427370 | AI243615 | Hs.97740 | ESTs | 3.6 | 0.14 | upregulate stage |
| 427376 | AA401533 | Hs.19440 | ESTs | 2.1 | 0.16 | upregulate stage |
| 427387 | BE244966 | Hs.177584 | 3-oxoacid CoA transferase | 1 | 0.39 | upregulate stage |
| 427470 | AW999924 | Hs.178357 | Homo sapiens cDNA FLJ13657 fis, clone PL | 3.4 | 0.16 | upregulate stage |
| 427519 | AW085233 | Hs.180696 | ESTs | 8.23 | 0.1 | upregulate stage |
| 427521 | AW973352 | Hs.299056 | ESTs | 7.75 | 0.1 | upregulate stage |
| 427528 | AU077143 | Hs.179565 | minichromosome maintenance deficient (S. | 5.7 | 0.15 | upregulate stage |
| 427566 | AI743515 | | gb: wf72b08.x2 Soares_NFL_T_GBC_S1 Homo s | 1 | 1 | upregulate stage |
| 427581 | NM_014788 | Hs.179703 | KIAA0129 gene product | 11.45 | 0.06 | upregulate stage |
| 427585 | D31152 | Hs.179729 | collagen, type X, alpha 1 (Schmid metaph | 3.25 | 0.16 | upregulate stage |
| 427603 | AI090838 | Hs.98006 | ESTs | 1 | 1 | upregulate stage |
| 427646 | AI678042 | Hs.271953 | ESTs | 5.7 | 0.11 | upregulate stage |
| 427652 | AI673025 | Hs.43874 | ESTs | 1 | 0.34 | upregulate stage |
| 427742 | AA411880 | Hs.190888 | ESTs | 2.4 | 0.16 | upregulate stage |
| 427814 | W28383 | Hs.180900 | Williams-Beuren syndrome chromosome regi | 9.13 | 0.08 | upregulate stage |
| 427839 | AA608823 | Hs.98244 | ESTs | 1.9 | 0.19 | upregulate stage |
| 427878 | C05766 | Hs.181022 | CGI-07 protein | 4.1 | 0.14 | upregulate stage |
| 427922 | AK001934 | Hs.181112 | HSPC126 protein | 2.6 | 0.19 | upregulate stage |
| 427933 | AW974643 | Hs.190571 | ESTs | 4.55 | 0.14 | upregulate stage |
| 427934 | AA810541 | Hs.291866 | ESTs | 1 | 1 | upregulate stage |
| 427944 | AA417878 | Hs.48401 | ESTs, Weakly similar to ALU8_HUMAN ALU S | 6.15 | 0.1 | upregulate stage |
| 427961 | AW293165 | Hs.143134 | ESTs | 4.85 | 0.11 | upregulate stage |
| 427986 | N45214 | Hs.282387 | Homo sapiens cDNA: FLJ21837 fis, clone H | 3.55 | 0.13 | upregulate stage |
| 428003 | AL110200 | Hs.181384 | Homo sapiens mRNA; cDNA DKFZp586B0922 (f | 1.45 | 0.36 | upregulate stage |
| 428004 | AA449563 | Hs.300270 | ESTs | 3.95 | 0.12 | upregulate stage |
| 428010 | AA806554 | Hs.185375 | ESTs | 1 | 0.38 | upregulate stage |
| 428057 | AI343641 | Hs.185798 | ESTs | 10.1 | 0.06 | upregulate stage |
| 428058 | AI821625 | Hs.191602 | ESTs | 1 | 0.5 | upregulate stage |
| 428071 | AF212848 | Hs.182339 | ets homologous factor | 6.4 | 0.09 | upregulate stage |
| 428182 | BE386042 | Hs.293317 | ESTs, Weakly similar to JM27 [H. sapiens ] | 1 | 0.23 | upregulate stage |
| 428192 | AA424051 | | gb: zn80d03.s1 Soares_total_fetus_Nb2HF8_{—} | 2.45 | 0.16 | upregulate stage |
| 428227 | AA321649 | Hs.2248 | small inducible cytokine subfamily B (Cy | 9.25 | 0.04 | upregulate stage |
| 428403 | AI393048 | Hs.239894 | leucine rich repeat (in FLII) interactin | 9.94 | 0.06 | upregulate stage |
| 428436 | BE080180 | | gb: RC4-BT0629-120200-011-b10 BT0629 Homo | 1 | 1 | upregulate stage |
| 428450 | NM_014791 | Hs.184339 | KIAA0175 gene product | 4.43 | 0.16 | upregulate stage |
| 428479 | Y00272 | Hs.184572 | cell division cycle 2, G1 to S and G2 to | 9.2 | 0.07 | upregulate stage |
| 428529 | AW262022 | Hs.106278 | Homo sapiens cDNA FLJ12839 fis, clone NT | 1 | 1 | upregulate stage |
| 428576 | AW009330 | Hs.167621 | ESTs | 1 | 0.3 | upregulate stage |
| 428605 | AB037862 | Hs.186756 | KIAA1441 protein | 9.25 | 0.09 | upregulate stage |
| 428664 | AK001666 | Hs.189095 | similar to SALL1 (sal (Drosophila)-like | 3.8 | 0.08 | upregulate stage |
| 428685 | AF131853 | Hs.189527 | Homo sapiens clone 25016 mRNA sequence | 1 | 1 | upregulate stage |
| 428716 | AL122118 | Hs.190614 | Homo sapiens mRNA; cDNA DKFZp434O1221 (f | 1 | 0.65 | upregulate stage |
| 428783 | AW070204 | Hs.178176 | ESTs | 1.6 | 0.23 | upregulate stage |
| 428788 | AF082283 | Hs.193516 | B-cell CLL/lymphoma 10 | 9.6 | 0.08 | upregulate stage |
| 428829 | R14050 | Hs.194051 | Homo sapiens mRNA; cDNA DKFZp566B213 (fr | 5.45 | 0.11 | upregulate stage |
| 428839 | AI767756 | Hs.82302 | ESTs | 10 | 0.06 | upregulate stage |
| 428881 | AI298368 | Hs.98918 | ESTs | 1.4 | 0.18 | upregulate stage |
| 428954 | AF100781 | Hs.194678 | WNT1 inducible signaling pathway protein | 1 | 1 | upregulate stage |
| 428988 | AA442900 | Hs.27947 | ESTs | 3.05 | 0.13 | upregulate stage |
| 429042 | AW015489 | Hs.235920 | ESTs | 1 | 0.56 | upregulate stage |
| 429057 | AF156557 | Hs.194816 | stomatin-like protein 1 | 0.95 | 0.93 | upregulate stage |
| 429066 | AA868555 | Hs.178222 | ESTs | 6 | 0.11 | upregulate stage |
| 429072 | AI376228 | Hs.108043 | Friend leukemia virus integration 1 | 1 | 1 | upregulate stage |
| 429083 | Y09397 | Hs.227817 | BCL2-related protein A1 | 11.12 | 0.03 | upregulate stage |
| 429091 | AA935658 | Hs.187939 | ESTs | 8.9 | 0.08 | upregulate stage |
| 429115 | AA446728 | Hs.289020 | Homo sapiens cDNA FLJ14098 fis, clone MA | 4.1 | 0.17 | upregulate stage |
| 429127 | AA749382 | Hs.107233 | ESTs | 1 | 0.23 | upregulate stage |
| 429135 | AA446966 | Hs.99090 | ESTs, Moderately similar to similar to K | 1 | 1 | upregulate stage |
| 429170 | NM_001394 | Hs.2359 | dual specificity phosphatase 4 | 8.6 | 0.08 | upregulate stage |
| 429174 | BE559598 | Hs.197803 | KIAA0160 protein | 8.4 | 0.06 | upregulate stage |
| 429236 | AA448407 | | gb: zw68d11.s1 Soares_testis_NHT Homo sap | 1 | 0.36 | upregulate stage |
| 429268 | AA205386 | Hs.198481 | RAR-related orphan receptor B | 2.9 | 0.16 | upregulate stage |
| 429300 | AB011108 | Hs.198891 | serine/threonine-protein kinase PRP4 hom | 4.25 | 0.15 | upregulate stage |
| 429334 | D63078 | Hs.186180 | Homo sapiens cDNA: FLJ23038 fis, clone L | 2.95 | 0.11 | upregulate stage |
| 429344 | R94038 | Hs.199538 | inhibin, beta C | 2.91 | 0.28 | upregulate stage |
| 429359 | W00482 | Hs.2399 | matris metalloproteinase 14 (membrane-in | 1.19 | 0.68 | upregulate stage |
| 429376 | AI867889 | Hs.43227 | ESTs | 1 | 1 | upregulate stage |
| 429412 | NM_006235 | Hs.2407 | POU domain, class 2, associating factor | 8.15 | 0.07 | upregulate stage |
| 429450 | AA824451 | Hs.94292 | Homo sapiens cDNA: FLJ23311 fis, clone H | 3.3 | 0.17 | upregulate stage |
| 429472 | AW452421 | Hs.15652 | ESTs | 1 | 1 | upregulate stage |
| 429482 | AF076974 | Hs.203952 | transformation/transcripton domain-asso | 1.52 | 0.59 | upregulate stage |
| 429486 | AF155827 | Hs.203963 | hypothetical protein FLJ10339 | 2.9 | 0.15 | upregulate stage |
| 429572 | AW295375 | Hs.39474 | ESTs | 1 | 0.95 | upregulate stage |
| 429584 | AI817785 | Hs.183037 | protein kinase, cAMP-dependent, regulato | 6.55 | 0.1 | upregulate stage |
| 429590 | AI219490 | Hs.44445 | ESTs, Weakly similar to Kelch motif cont | 1 | 1 | upregulate stage |
| 429597 | NM_003816 | Hs.2442 | a disintegrin and metalloproteinase doma | 5.6 | 0.14 | upregulate stage |
| 429601 | AI804293 | Hs.119406 | ESTs, Weakly similar to AF143946 1 trans | 1.36 | 0.58 | upregulate stage |
| 429602 | AA521463 | Hs.183424 | ESTs | 1 | 0.34 | upregulate stage |
| 429617 | X89984 | Hs.211563 | B-cell CLL/lymphoma 7A | 10.8 | 0.07 | upregulate stage |
| 429629 | BE501732 | Hs.30622 | Homo sapiens cDNA FLJ13010 fis, clone NT | 3.4 | 0.12 | upregulate stage |
| 429631 | AA455612 | Hs.136710 | EST | 1 | 1 | upregulate stage |
| 429644 | AA455892 | Hs.156379 | ESTs | 3.4 | 0.15 | upregulate stage |
| 429653 | NM_005955 | Hs.211581 | metal-regulatory transcription factor 1 | 4.45 | 0.17 | upregulate stage |
| 429664 | L20433 | Hs.211588 | POU domain, class 4, transcription facto | 1.17 | 0.74 | upregulate stage |
| 429673 | AA884407 | Hs.211595 | protein tyrosine phosphatase, non-recept | 3.19 | 0.22 | upregulate stage |
| 429699 | AI383469 | Hs.159300 | ESTs | 4.4 | 0.1 | upregulate stage |
| 429782 | NM_005754 | Hs.220689 | Ras-GTPase-activating protein SH3-domain | 4.25 | 0.13 | upregulate stage |
| 429813 | AW139678 | Hs.180791 | ESTs | 1 | 0.95 | upregulate stage |
| 429828 | AB019494 | Hs.225767 | IDN3 protein | 4.2 | 0.14 | upregulate stage |
| 429838 | AW904907 | Hs.108241 | ESTs, Weakly similar to The KIAA0191 gen | 3.25 | 0.14 | upregulate stage |
| 429859 | NM_007050 | Hs.225952 | protein tyrosine phosphatase, receptor t | 1 | 0.36 | upregulate stage |
| 429913 | AA460608 | Hs.99552 | ESTs | 1.35 | 0.2 | upregulate stage |
| 429917 | H80572 | | gb: yu76c02.r1 Soaren fetal liver spleen | 4.8 | 0.13 | upregulate stage |
| 429921 | AA526911 | Hs.102756 | ESTs | 1 | 0.63 | upregulate stage |
| 429950 | AW081608 | Hs.105053 | ESTs | 3.7 | 0.13 | upregulate stage |
| 429971 | AF079550 | Hs.227098 | glial cells missing (Drosophila) homolog | 1 | 0.83 | upregulate stage |
| 429979 | AA463338 | | gb: zx97a10.r1 Soares_NhHMPu_S1 Homo sapi | 1 | 0.32 | upregulate stage |
| 429982 | AW449534 | Hs.99607 | Homo sapiens cDNA FLJ13841 fis, clone TH | 9.45 | 0.08 | upregulate stage |
| 429986 | AF092047 | Hs.227277 | sine oculis homeobox (Drosophila) homolo | 0.78 | 0.58 | upregulate stage |
| 430020 | AI539029 | Hs.99607 | Homo sapiens cDNA FLJ13841 fis, clone TH | 1 | 0.36 | upregulate stage |
| 430021 | AA463913 | Hs.221160 | ESTs | 1 | 0.56 | upregulate stage |
| 430049 | AW277085 | Hs.99619 | ESTs | 3.55 | 0.17 | upregulate stage |
| 430060 | NM_002941 | Hs.301198 | roundabout (axon guidance receptor, Dros | 1 | 0.59 | upregulate stage |
| 430076 | AA465115 | | gb: aa32c11.r1 NCI_CGAP_GCB1 Homo sapiens | 5.4 | 0.12 | upregulate stage |
| 430134 | BE380149 | Hs.105223 | ESTs, Weakly similar to contains similar | 3.6 | 0.13 | upregulate stage |
| 430184 | AB013802 | Hs.234790 | contactin 5 | 1 | 1 | upregulate stage |
| 430195 | AW969308 | Hs.188594 | ESTs | 9.15 | 0.1 | upregulate stage |
| 430279 | R85974 | Hs.16279 | ESTs | 1.2 | 0.52 | upregulate stage |
| 430287 | AW182459 | Hs.125759 | ESTs, Weakly similar to tumor suppressor | 4.05 | 0.15 | upregulate stage |
| 430291 | AV660345 | Hs.238126 | CGI-49 protein | 7.2 | 0.08 | upregulate stage |
| 430299 | W28673 | Hs.106747 | serine carboxypeptidase 1 precursor prot | 11.9 | 0.06 | upregulate stage |
| 430350 | BE169639 | | gb: PM1-HT0527-280200-005-a05 HT0527 Homo | 7.1 | 0.09 | upregulate stage |
| 430387 | AW372884 | Hs.240770 | nuclear cap binding protein subunit 2, 2 | 5.9 | 0.11 | upregulate stage |
| 430486 | BE062109 | Hs.241551 | chloride channel, calcium activated, fam | 2.56 | 0.2 | upregulate stage |
| 430488 | D19589 | Hs.4220 | ESTs, Moderately similar to tetracycline | 10.5 | 0.08 | upregulate stage |
| 430512 | AF182294 | Hs.241578 | U6 snRNA-associated Sm-like protein LSm8 | 11.2 | 0.06 | upregulate stage |
| 430519 | AF129534 | Hs.49210 | F-box only protein 4 | 5.35 | 0.11 | upregulate stage |
| 430550 | AK000062 | Hs.243756 | hypothetical protein FLJ20055 | 1 | 1 | upregulate stage |
| 430561 | BE065227 | | gb: RC1-BT0314-310300-015-b06 BT0314 Homo | 1 | 1 | upregulate stage |
| 430563 | AA481269 | Hs.178381 | ESTs | 1 | 0.45 | upregulate stage |
| 430598 | AK001764 | Hs.247112 | hypothetical protein FLJ10902 | 4.75 | 0.14 | upregulate stage |
| 430630 | AW269920 | Hs.2621 | cystatin A (stefin A) | 2.52 | 0.25 | upregulate stage |
| 430634 | AI860651 | Hs.26685 | ESTs | 1.24 | 0.61 | upregulate stage |
| 430637 | BE160081 | Hs.256290 | S100 calciam-binding protein A11 (calgiz | 1.79 | 0.47 | upregulate stage |
| 430640 | AA482636 | | gb: zv29c06.r1 Soares ovary tumor NbHOT H | 9.15 | 0.08 | upregulate stage |
| 430665 | BE350122 | Hs.157367 | ESTs | 9.4 | 0.08 | upregulate stage |
| 430726 | AL031224 | Hs.247850 | Human DNA sequence from clone 336H9 on c | 1 | 0.27 | upregulate stage |
| 430733 | AW975920 | Hs.283361 | ESTs | 3.5 | 0.13 | upregulate stage |
| 430781 | AW088127 | Hs.278536 | ESTs | 1 | 1 | upregulate stage |
| 430791 | AA486293 | Hs.272068 | ESTs, Moderately similar to alternativel | 1.61 | 0.42 | upregulate stage |
| 430817 | AA487242 | Hs.185105 | ESTs | 1 | 1 | upregulate stage |
| 430888 | BE155293 | Hs.76064 | ribosomal protein L27a | 3.05 | 0.17 | upregulate stage |
| 430918 | NM_000843 | Hs.248131 | glutamate receptor, metabotropic 6 | 9.05 | 0.09 | upregulate stage |
| 430926 | L05597 | Hs.248136 | 5-hydroxytryptamine (serotonin) receptor | 1 | 0.91 | upregulate stage |
| 430994 | AA490346 | Hs.40530 | ESTs | 1.03 | 0.89 | upregulate stage |
| 431009 | BE149762 | Hs.248213 | gap junction protein, beta 6 (connexin 3 | 24.8 | 0.03 | upregulate stage |
| 431023 | AI283133 | Hs.178925 | ESTs | 2.55 | 0.15 | upregulate stage |
| 431030 | AA830525 | Hs.291988 | ESTs | 1 | 0.47 | upregulate stage |
| 431041 | AA490967 | Hs.105276 | ESTs | 1 | 0.36 | upregulate stage |
| 431070 | AW408164 | Hs.249184 | transcription factor 19 (SC1) | 1.65 | 0.45 | upregulate stage |
| 431082 | AA491600 | Hs.161942 | ESTs | 9.85 | 0.06 | upregulate stage |
| 431089 | BE041395 | Hs.283676 | ESTs, Weakly similar to unknown protein | 43.15 | 0.01 | upregulate stage |
| 431146 | Z83850 | Hs.250649 | Human DNA sequence from PAC 82J11 and co | 1 | 0.4 | upregulate stage |
| 431173 | AW971198 | Hs.294068 | ESTs | 6.3 | 0.12 | upregulate stage |
| 431245 | AA496933 | Hs.191687 | ESTs | 1 | 1 | upregulate stage |
| 431253 | R06428 | Hs.226351 | ESTs | 1 | 0.8 | upregulate stage |
| 431267 | AW969661 | Hs.124047 | ESTs | 1 | 0.31 | upregulate stage |
| 431287 | BE044989 | Hs.274901 | ESTs | 1 | 1 | upregulate stage |
| 431322 | AW970622 | | gb: EST382704 MAGE resequences, MAGK Homo | 10.8 | 0.06 | upregulate stage |
| 431332 | AA503297 | Hs.117108 | ESTs | 6.55 | 0.1 | upregulate stage |
| 431343 | AW970603 | Hs.300941 | Homo sapiens cDNA FLJ11661 fis, clone HE | 5.65 | 0.09 | upregulate stage |
| 431346 | AA371059 | Hs.251636 | ubiquitin specific protease 3 | 1.68 | 0.52 | upregulate stage |
| 431347 | AI133461 | Hs.251664 | insulin-like growth factor 2 (somatomedi | 1.12 | 0.47 | upregulate stage |
| 431381 | AA577114 | Hs.105727 | ESTs | 1 | 0.36 | upregulate stage |
| 431448 | AL137517 | Hs.288381 | hypothetical protein DKFZp564O1278 | 3.72 | 0.13 | upregulate stage |
| 431494 | AA991355 | Hs.129808 | ESTs | 2.75 | 0.18 | upregulate stage |
| 431510 | AA580082 | Hs.112264 | ESTs | 3.75 | 0.13 | upregulate stage |
| 431560 | BE244135 | Hs.260238 | hypothetical protein FLJ10842 | 9.1 | 0.08 | upregulate stage |
| 431571 | AW500486 | Hs.180610 | splicing factor proline/glutamine rich ( | 7.5 | 0.11 | upregulate stage |
| 431596 | T34708 | Hs.272927 | Sec23 (S. cerivisiae) homolog A | 8.2 | 0.08 | upregulate stage |
| 431610 | AK000972 | Hs.264363 | hypothetical protein FLJ10110 | 6.4 | 0.1 | upregulate stage |
| 431613 | AA018515 | Hs.264482 | Apg12 (autophagy 12, S. cerivisiae)-like | 5.8 | 0.11 | upregulate stage |
| 431630 | NM_002204 | Hs.265829 | integrin, alpha 3 (antigen CD49C, alpha | 1.3 | 0.59 | upregulate stage |
| 431663 | NM_016569 | Hs.267182 | TBX3-iso protein | 1.6 | 0.52 | upregulate stage |
| 431670 | AW971287 | | gb: EST383376 MAGE resequences, MAGL Homo | 1 | 1 | upregulate stage |
| 431689 | AA305688 | Hs.267695 | UDP-Gal: betaGlcNAc beta 1,3-galactosyltr | 9.1 | 0.05 | upregulate stage |
| 431691 | AI208511 | Hs.292510 | ESTs | 4.15 | 0.12 | upregulate stage |
| 431692 | AL021331 | Hs.267749 | unc93 (C. elegans) homolog A | 4.2 | 0.13 | upregulate stage |
| 431694 | AW970112 | Hs.292697 | ESTs | 1 | 0.83 | upregulate stage |
| 431726 | NM_015361 | Hs.268053 | KIAA0029 protein | 10.1 | 0.07 | upregulate stage |
| 431736 | AI912234 | Hs.151245 | ESTs | 9.9 | 0.08 | upregulate stage |
| 431753 | X76029 | Hs.2841 | neuromedin U | 1 | 0.23 | upregulate stage |
| 431781 | AA515474 | Hs.99908 | nuclear receptor coactivator 4 | 1 | 0.36 | upregulate stage |
| 431810 | X67155 | Hs.270845 | kinesin-like 5 (mitotic kinesin-like pro | 1 | 0.65 | upregulate stage |
| 431814 | BE256242 | Hs.270847 | delta-tubulin | 3.35 | 0.18 | upregulate stage |
| 431817 | X65233 | Hs.271079 | zinc finger protein 80 (pT17) | 1 | 1 | upregulate stage |
| 431828 | AA572994 | | gb: nm33f12.s1 NCI_CGAP_Lip2 Homo sapiens | 4 | 0.12 | upregulate stage |
| 431880 | AI700238 | Hs.187486 | ESTs | 1 | 1 | upregulate stage |
| 431890 | X17033 | Hs.271986 | integrin, alpha 2 (CD49B, alpha 2 subuni | 2.89 | 0.27 | upregulate stage |
| 431941 | AK000106 | Hs.272227 | Homo sapiens cDNA FLJ20099 fis, clone CO | 1 | 0.18 | upregulate stage |
| 431951 | AI086335 | Hs.136470 | ESTs | 6.4 | 0.11 | upregulate stage |
| 431958 | X63629 | Hs.2877 | cadherin 3, type 1, P-cadherin (placenta | 9.09 | 0.07 | upregulate stage |
| 431989 | AW972870 | Hs.291069 | ESTs | 1 | 0.23 | upregulate stage |
| 431992 | NM_002742 | Hs.2891 | protein kinase C, mu | 3.9 | 0.15 | upregulate stage |
| 432015 | AL157504 | Hs.159115 | ESTs | 6.05 | 0.09 | upregulate stage |
| 432023 | AW273128 | Hs.214188 | ESTs | 0.99 | 0.86 | upregulate stage |
| 432028 | AJ272208 | Hs.272354 | interleukin 1 receptor accessory protein | 1 | 0.48 | upregulate stage |
| 432039 | AF220217 | Hs.272374 | Homo sapiens rsec15-like protein mRNA, p | 1 | 0.24 | upregulate stage |
| 432065 | AA401039 | Hs.2903 | protein phosphatase 4 (formerly X), cata | 1.38 | 0.64 | upregulate stage |
| 432069 | AW975868 | Hs.294100 | ESTs | 4.25 | 0.15 | upregulate stage |
| 432072 | N62937 | Hs.269109 | ESTs | 5.9 | 0.09 | upregulate stage |
| 432093 | H28383 | | gb: yl52c03.r1 Soares breast 3NbHBst Homo | 7.9 | 0.08 | upregulate stage |
| 432136 | AA157632 | Hs.272630 | vacuolar proton pump delta polypeptide | 1 | 0.28 | upregulate stage |
| 432162 | AA584062 | Hs.272798 | hypothetical protein FLJ20413 | 2.5 | 0.25 | upregulate stage |
| 432169 | Y00971 | Hs.2910 | phosphoribosyl pyrophosphate synthetase | 6.1 | 0.11 | upregulate stage |
| 432215 | AU076609 | Hs.2934 | ribonucleotide reductase M1 polypeptide | 2.44 | 0.29 | upregulate stage |
| 432222 | AI204995 | | gb: an03c03.x1 Stratagene schizo brain S1 | 15 | 0.02 | upregulate stage |
| 432235 | AA531129 | Hs.190297 | ESTs | 9.57 | 0.06 | upregulate stage |
| 432237 | AK001926 | Hs.274132 | hypothetical protein FLJ11064 | 1 | 0.44 | upregulate stage |
| 432239 | X81334 | Hs.2936 | matrix metalloproteinase 13 (collagenase | 4.3 | 0.1 | upregulate stage |
| 432281 | AK001239 | Hs.274263 | hypothetical protein FLJ10377 | 3.95 | 0.15 | upregulate stage |
| 432338 | AA534197 | Hs.272693 | ESTs | 1 | 1 | upregulate stage |
| 432374 | W68815 | Hs.301885 | Homo sapiens cDNA FLJ11346 fis, clone PL | 1.97 | 0.4 | upregulate stage |
| 432375 | BE536069 | Hs.2962 | S100 calcium-binding protein P | 1.16 | 0.58 | upregulate stage |
| 432407 | AA221036 | Hs.285026 | HERV-H LTR-associating 1 | 3.75 | 0.16 | upregulate stage |
| 432410 | X68561 | Hs.2982 | Sp4 transcription factor | 1 | 1 | upregulate stage |
| 432415 | T16971 | Hs.289014 | ESTs | 7.3 | 0.07 | upregulate stage |
| 432432 | AA541323 | Hs.115831 | ESTs | 5.35 | 0.13 | upregulate stage |
| 432435 | BE218886 | Hs.282070 | ESTs | 5.35 | 0.1 | upregulate stage |
| 432441 | AW292425 | Hs.163484 | ESTs | 19.4 | 0.04 | upregulate stage |
| 432518 | AI675836 | Hs.94319 | ESTs | 1 | 0.59 | upregulate stage |
| 432580 | X82018 | Hs.3053 | zinc finger protein with interaction dom | 9.15 | 0.08 | upregulate stage |
| 432606 | NM_002104 | Hs.3066 | granzyme K (serine protease, granzyme 3: | 10.15 | 0.05 | upregulate stage |
| 432614 | AA557153 | Hs.185853 | ESTs | 1 | 0.33 | upregulate stage |
| 432642 | BE297635 | Hs.3069 | heat shock 70 kD protein 98 (mortalin-2) | 10.5 | 0.07 | upregulate stage |
| 432661 | AW973823 | Hs.283526 | ESTs | 1 | 1 | upregulate stage |
| 432666 | AW204069 | Hs.129250 | ESTs, Weakly similar to unnamed protein | 1 | 0.16 | upregulate stage |
| 432669 | AL043482 | Hs.267115 | ESTs | 4.15 | 0.12 | upregulate stage |
| 432673 | AB028859 | Hs.278605 | ER-associated DNAJ; ER-associated Hsp40 | 10.24 | 0.06 | upregulate stage |
| 432678 | AA923424 | Hs.135567 | ESTs | 1 | 0.69 | upregulate stage |
| 432690 | AF181490 | Hs.278627 | prenylcysteine lyase | 4.55 | 0.12 | upregulate stage |
| 432724 | X98266 | | gb: H. sapiens mRNA for ligase like protei | 1 | 1 | upregulate stage |
| 432758 | NM_014091 | Hs.278920 | PRO1510 protein | 1 | 1 | upregulate stage |
| 432773 | NM_014124 | Hs.278935 | PRO0255 protein | 1 | 1 | upregulate stage |
| 432789 | D26361 | Hs.3104 | KIAA0042 gene product | 3.46 | 0.22 | upregulate stage |
| 432829 | W60377 | Hs.57772 | ESTs | 1.33 | 0.43 | upregulate stage |
| 432840 | AK001403 | Hs.279521 | hypothetical protein FLJ20530 | 4.5 | 0.14 | upregulate stage |
| 432900 | BE178025 | Hs.7942 | hypothetical protein FLJ20080 | 1 | 0.3 | upregulate stage |
| 432917 | NM_014125 | Hs.279812 | PRO0327 protein | 6.33 | 0.12 | upregulate stage |
| 432935 | AW270239 | Hs.213709 | ESTs | 3.85 | 0.11 | upregulate stage |
| 432963 | AA572859 | Hs.225791 | ESTs | 1 | 0.19 | upregulate stage |
| 433001 | AF217513 | Hs.279905 | clone HQ0310 PRO0310p1 | 29.9 | 0.03 | upregulate stage |
| 433005 | AW939074 | | gb: QV1-DT0069-010200-057-c12 DT0069 Homo | 1 | 0.59 | upregulate stage |
| 433129 | AA577814 | | gb: nn24d03.s1 NCI_CGAP_Gas1 Homo sapiens | 1 | 1 | upregulate stage |
| 433159 | AB035898 | Hs.150587 | kinesin-like protein 2 | 6 | 0.1 | upregulate stage |
| 433201 | AB040896 | Hs.21104 | KIAA1463 protein | 9.2 | 0.09 | upregulate stage |
| 433211 | H11850 | Hs.12808 | MARK | 1.6 | 0.45 | upregulate stage |
| 433218 | AI040372 | Hs.278894 | KIAA1482 protein | 1 | 0.44 | upregulate stage |
| 433222 | AW514472 | Hs.238415 | ESTs, Moderately similar to ALU8_HUMAN A | 5.45 | 0.12 | upregulate stage |
| 433230 | AW136134 | Hs.220277 | ESTs | 7.3 | 0.09 | upregulate stage |
| 433237 | AB040930 | Hs.297021 | Homo sapiens cDNA FLJ13211 fis, clone NT | 1 | 1 | upregulate stage |
| 433365 | AF026944 | Hs.293797 | ESTs | 4.95 | 0.08 | upregulate stage |
| 433371 | T25451 | | gb: PTHI188 HTCDL1 Homo sapiens cDNA 5′/3 | 4.75 | 0.12 | upregulate stage |
| 433394 | AI907753 | Hs.93810 | cerebral cavernous malformations 1 | 4.5 | 0.11 | upregulate stage |
| 433424 | R68252 | Hs.163566 | ESTs | 1 | 1 | upregulate stage |
| 433440 | AF052127 | | gb: Homo sapiens clone 23850 mRNA sequenc | 1 | 1 | upregulate stage |
| 433452 | AW296906 | Hs.142869 | ESTs | 9.82 | 0.08 | upregulate stage |
| 433456 | AA593447 | Hs.124296 | ESTs | 9.45 | 0.08 | upregulate stage |
| 433467 | AI420457 | Hs.50955 | ESTs | 1.11 | 0.74 | upregulate stage |
| 433479 | AW511459 | Hs.249972 | ESTs | 3.35 | 0.13 | upregulate stage |
| 433484 | BE264397 | Hs.148674 | ESTs | 1 | 0.27 | upregulate stage |
| 433515 | AA595800 | Hs.190246 | ESTs | 3.05 | 0.14 | upregulate stage |
| 433602 | AI769948 | Hs.24906 | ESTs | 1 | 1 | upregulate stage |
| 433613 | AA836126 | Hs.5669 | ESTs | 2.8 | 0.12 | upregulate stage |
| 433625 | AW955674 | Hs.161762 | ESTs | 1 | 0.53 | upregulate stage |
| 433658 | L03678 | Hs.156110 | immunoglobulin kappa constant | 9.65 | 0.05 | upregulate stage |
| 433672 | BE281165 | Hs.288038 | TLS-associated serine-arginine protein 1 | 7.9 | 0.08 | upregulate stage |
| 433730 | AK002135 | Hs.3542 | hypothetical protein FLJ11273 | 6.7 | 0.11 | upregulate stage |
| 433735 | AA608955 | Hs.109653 | ESTs | 8.95 | 0.08 | upregulate stage |
| 433895 | AI287912 | Hs.3628 | mitogen-activated protein kinase kinase | 4.43 | 0.16 | upregulate stage |
| 433904 | AI399956 | Hs.208956 | ESTs | 5.5 | 0.12 | upregulate stage |
| 433929 | AI375499 | Hs.27379 | ESTs | 7 | 0.09 | upregulate stage |
| 433966 | AF113017 | Hs.284301 | PRO1268 protein | 7.95 | 0.08 | upregulate stage |
| 433967 | AF113018 | Hs.284302 | PRO1621 protein | 2.65 | 0.1 | upregulate stage |
| 434006 | AF113688 | | gb: Homo sapiens clone FLB4630 | 7.85 | 0.08 | upregulate stage |
| 434037 | AF116601 | Hs.283048 | hypothetical protein PRO0128 | 8.81 | 0.09 | upregulate stage |
| 434064 | AL049045 | Hs.180758 | hypothetical protein PRO0082 | 8.35 | 0.09 | upregulate stage |
| 434085 | AF116673 | Hs.250029 | hypothetical protein PRO1925 | 1 | 1 | upregulate stage |
| 434092 | AA625155 | | gb: at70d06.r1 Soares_NhHMPu_S1 Homo sapi | 1 | 1 | upregulate stage |
| 434094 | AA305599 | Hs.238205 | hypothetical protein PRO2013 | 11.5 | 0.06 | upregulate stage |
| 434138 | AA625804 | | gb: zu86h01.s1 Soares_testis_NHT Homo sap | 3.55 | 0.11 | upregulate stage |
| 434192 | AW387314 | Hs.34371 | ESTs | 1.65 | 0.22 | upregulate stage |
| 434194 | AF119847 | Hs.283940 | Homo sapiens PRO1550 mRNA, partial cds | 7.85 | 0.09 | upregulate stage |
| 434217 | AW014795 | Hs.23349 | ESTs | 3.8 | 0.13 | upregulate stage |
| 434228 | Z42047 | Hs.283978 | Homo sapiens PRO2751 mRNA, complete cds | 5.95 | 0.11 | upregulate stage |
| 434271 | AA897778 | Hs.201677 | ESTs | 1 | 0.38 | upregulate stage |
| 434280 | BE005398 | | gb: CM1-BN0116-150400-189-h02 BN0116 Homo | 9.45 | 0.07 | upregulate stage |
| 434322 | AI125886 | Hs.152727 | ESTs | 2.65 | 0.18 | upregulate stage |
| 434351 | AW974991 | Hs.191852 | ESTs, Weakly similar to ALU1_HUMAN ALU S | 1 | 0.61 | upregulate stage |
| 434354 | AW974912 | Hs.292783 | ESTs | 1 | 1 | upregulate stage |
| 434398 | AA121098 | Hs.3838 | serum-inducible kinase | 10.7 | 0.08 | upregulate stage |
| 434464 | BE063921 | Hs.295971 | ESTs | 10.15 | 0.07 | upregulate stage |
| 434466 | AB037829 | Hs.3862 | regulator of nonsense transcripts 2; DKF | 7.6 | 0.09 | upregulate stage |
| 434484 | W79839 | Hs.104336 | hypothetical protein | 5.1 | 0.15 | upregulate stage |
| 434513 | AF143888 | Hs.18213 | Homo sapiens clone IMAGE: 121736 mRNA seq | 1 | 1 | upregulate stage |
| 434534 | H90477 | Hs.41407 | ESTs | 1 | 0.18 | upregulate stage |
| 434540 | NM_016045 | Hs.5184 | TH1 drosophila homolog | 12.4 | 0.06 | upregulate stage |
| 434569 | AI311295 | Hs.58609 | ESTs | 1.75 | 0.38 | upregulate stage |
| 434575 | AI133446 | Hs.29964 | ESTs | 9.7 | 0.06 | upregulate stage |
| 434627 | AI221894 | Hs.39311 | ESTs | 1.65 | 0.17 | upregulate stage |
| 434629 | AA789081 | Hs.4029 | glioma-amplified sequence-41 | 9 | 0.07 | upregulate stage |
| 434663 | AA641972 | Hs.130058 | ESTs | 4.55 | 0.15 | upregulate stage |
| 434731 | AA648049 | Hs.121518 | ESTs | 8.5 | 0.1 | upregulate stage |
| 434765 | AA831115 | Hs.190473 | ESTs | 1 | 0.71 | upregulate stage |
| 434773 | AA648962 | Hs.152947 | ESTs | 10.55 | 0.08 | upregulate stage |
| 434792 | AA649253 | Hs.132458 | ESTs | 5.45 | 0.11 | upregulate stage |
| 434828 | D90070 | Hs.96 | phorbol-12-myristate-13-acetate-induced | 1 | 0.34 | upregulate stage |
| 434876 | AF160477 | Hs.245781 | Homo sapiens lg superfamily receptor LNI | 1.4 | 0.57 | upregulate stage |
| 434909 | AI479212 | Hs.17283 | hypothetical protein FLJ10890 | 1 | 0.91 | upregulate stage |
| 434926 | BE543269 | Hs.50252 | Homo sapiens HSPC283 mRNA, partial cds | 4.9 | 0.13 | upregulate stage |
| 434939 | AF161422 | Hs.21590 | Homo sapiens HSPC304 mRNA, partial cds | 1 | 1 | upregulate stage |
| 434963 | AW974957 | Hs.288719 | Homo sapiens cDNA FLJ12142 fis, clone MA | 10.75 | 0.07 | upregulate stage |
| 434970 | AW272262 | Hs.250468 | ESTs | 9.05 | 0.08 | upregulate stage |
| 434980 | AW770553 | Hs.293640 | ESTs | 4.95 | 0.14 | upregulate stage |
| 434997 | AW975155 | Hs.292163 | ESTs | 1 | 0.36 | upregulate stage |
| 435013 | H91923 | Hs.110024 | NADH: ubiquinone oxidoreductase MLRQ subu | 1.16 | 0.71 | upregulate stage |
| 435030 | AI203316 | Hs.148655 | ESTs, Weakly similar to ALU1_HUMAN ALU S | 2.95 | 0.14 | upregulate stage |
| 435047 | AA454985 | Hs.54973 | cadherin-like protein VR20 | 3.31 | 0.2 | upregulate stage |
| 435061 | AI651474 | Hs.163944 | ESTs | 1.4 | 0.2 | upregulate stage |
| 435080 | AI831760 | Hs.155111 | ESTs | 9.05 | 0.08 | upregulate stage |
| 435087 | AW975241 | Hs.23567 | ESTs | 1 | 1 | upregulate stage |
| 435108 | AW975018 | Hs.287440 | Homo sapiens cDNA FLJ11692 fis, clone HE | 1 | 0.2 | upregulate stage |
| 435136 | R27299 | Hs.10172 | ESTs | 8.9 | 0.07 | upregulate stage |
| 435159 | AA668879 | Hs.116649 | ESTs | 1.35 | 0.25 | upregulate stage |
| 435162 | AI911044 | Hs.213893 | ESTs | 1 | 1 | upregulate stage |
| 435166 | AI391470 | Hs.158618 | ESTs | 5.5 | 0.12 | upregulate stage |
| 435212 | AW300100 | Hs.164185 | ESTs | 1 | 1 | upregulate stage |
| 435237 | AI026836 | Hs.114689 | ESTs | 8.75 | 0.1 | upregulate stage |
| 435255 | W87434 | Hs.106015 | ESTs, Moderately similar to ALU1_HUMAN A | 3.4 | 0.14 | upregulate stage |
| 435256 | AF193766 | Hs.13872 | cytokine-like protein C17 | 3.2 | 0.14 | upregulate stage |
| 435257 | AA677026 | Hs.191217 | ESTs | 4.5 | 0.12 | upregulate stage |
| 435298 | AA677696 | Hs.189196 | ESTs | 1 | 1 | upregulate stage |
| 435307 | W90610 | Hs.192003 | ESTs | 1 | 0.87 | upregulate stage |
| 435347 | AW014873 | Hs.116963 | ESTs | 2.45 | 0.14 | upregulate stage |
| 435382 | N54493 | | gb: yv40g05.s1 Soares fetal liver spleen | 1 | 0.56 | upregulate stage |
| 435408 | H07897 | Hs.4302 | ESTs | 0.84 | 0.97 | upregulate stage |
| 435491 | T98543 | Hs.191900 | ESTs | 1 | 0.3 | upregulate stage |
| 435525 | AI831297 | Hs.123310 | ESTs | 3.25 | 0.15 | upregulate stage |
| 435597 | AW305188 | Hs.163027 | ESTs | 1 | 0.57 | upregulate stage |
| 435637 | AF220051 | Hs.110853 | uncharacterized hematopoietic stem/proge | 8.76 | 0.09 | upregulate stage |
| 435647 | AI653240 | Hs.49823 | ESTs | 3.19 | 0.25 | upregulate stage |
| 435738 | AA699633 | Hs.269543 | ESTs | 2.9 | 0.16 | upregulate stage |
| 435762 | AW043836 | Hs.212460 | ESTs | 1 | 1 | upregulate stage |
| 435809 | H90213 | Hs.191330 | ESTs | 1.25 | 0.23 | upregulate stage |
| 435826 | AI554089 | Hs.117880 | ESTs | 6.55 | 0.08 | upregulate stage |
| 435854 | AJ278120 | Hs.4996 | DKFZP564D166 protein | 2.76 | 0.29 | upregulate stage |
| 435979 | W03698 | Hs.83513 | ESTs, Weakly similar to ALU1_HUMAN ALU S | 1 | 0.25 | upregulate stage |
| 435981 | H74319 | Hs.188620 | ESTs | 6.35 | 0.11 | upregulate stage |
| 435990 | AI015862 | Hs.131793 | ESTs | 4.25 | 0.08 | upregulate stage |
| 435999 | AA703271 | Hs.269903 | ESTs, Moderately similar to ALU1_HUMAN A | 1 | 1 | upregulate stage |
| 436016 | AA806465 | Hs.121536 | ESTs | 1.45 | 0.23 | upregulate stage |
| 436023 | T81819 | | gb: yd95f05.s1 Soares fetal liver spleen | 9.15 | 0.07 | upregulate stage |
| 436052 | AI021983 | Hs.271432 | ESTs | 1 | 0.23 | upregulate stage |
| 436115 | AW512033 | Hs.102004 | ESTs | 1.9 | 0.21 | upregulate stage |
| 436118 | AI221173 | Hs.145080 | ESTs | 1 | 1 | upregulate stage |
| 436120 | AI248193 | Hs.119860 | ESTs | 9.61 | 0.08 | upregulate stage |
| 436149 | AI754308 | Hs.159452 | ESTs | 2.4 | 0.19 | upregulate stage |
| 436156 | AA705466 | Hs.119900 | ESTs | 1 | 0.26 | upregulate stage |
| 436170 | AW450381 | Hs.14529 | ESTs | 1 | 0.91 | upregulate stage |
| 436202 | AA706315 | Hs.192057 | ESTs | 1 | 1 | upregulate stage |
| 436246 | AW450963 | Hs.119991 | ESTs | 3.85 | 0.11 | upregulate stage |
| 436274 | AA732755 | Hs.120299 | ESTs | 2.85 | 0.13 | upregulate stage |
| 436282 | R91913 | Hs.272104 | ESTs | 3.95 | 0.11 | upregulate stage |
| 436299 | AK000767 | Hs.5111 | hypothetical protein FLJ20729 | 6 | 0.09 | upregulate stage |
| 436300 | AA831601 | Hs.275736 | ESTs | 1 | 1 | upregulate stage |
| 436326 | BE085236 | Hs.181244 | major histocompatibility complex, class | 2.49 | 0.28 | upregulate stage |
| 436360 | AI962796 | Hs.136754 | ESTs | 2.4 | 0.17 | upregulate stage |
| 436363 | AA843926 | Hs.124434 | ESTs | 3.35 | 0.1 | upregulate stage |
| 436383 | BE065178 | | gb: RC1-BT0314-020200-012-h01 BT0314 Homo | 1 | 0.67 | upregulate stage |
| 436396 | AI683487 | Hs.299112 | Homo sapiens cDNA FLJ11441 fis, clone HE | 4 | 0.15 | upregulate stage |
| 436408 | AW274577 | Hs.252954 | ESTs | 9.1 | 0.09 | upregulate stage |
| 436422 | AA716141 | Hs.147027 | ESTs | 1 | 0.26 | upregulate stage |
| 436429 | AA357003 | Hs.17546 | hypothetical protein FLJ23499 | 1 | 1 | upregulate stage |
| 436463 | H06502 | Hs.6656 | ESTs | 5.45 | 0.12 | upregulate stage |
| 436476 | AA326108 | Hs.53631 | ESTs, Weakly similar to enhancer-of-spli | 7.75 | 0.07 | upregulate stage |
| 436507 | AA721209 | Hs.201630 | ESTs | 2.45 | 0.18 | upregulate stage |
| 436518 | AA766433 | Hs.122864 | ESTs | 3.15 | 0.21 | upregulate stage |
| 436522 | AA721381 | Hs.129876 | ESTs | 4.75 | 0.1 | upregulate stage |
| 436578 | AI091435 | Hs.134859 | ESTs | 3.4 | 0.12 | upregulate stage |
| 436670 | AI690021 | Hs.201536 | ESTs | 6.85 | 0.11 | upregulate stage |
| 436740 | AW975133 | | gb: EST387239 MAGE resequences, MAGH Homo | 7.4 | 0.09 | upregulate stage |
| 436764 | AW976004 | Hs.291731 | ESTs | 1 | 1 | upregulate stage |
| 436785 | AA745597 | Hs.291400 | ESTs | 1 | 1 | upregulate stage |
| 436823 | AW749865 | Hs.293645 | ESTs | 4.6 | 0.12 | upregulate stage |
| 436831 | AA830173 | Hs.291918 | ESTs | 1.6 | 0.27 | upregulate stage |
| 436839 | AA767346 | Hs.291614 | ESTs | 1 | 1 | upregulate stage |
| 436844 | AA766458 | Hs.122812 | ESTs | 1.5 | 0.28 | upregulate stage |
| 436853 | BE328074 | Hs.148661 | ESTs | 5.05 | 0.14 | upregulate stage |
| 436860 | H12751 | Hs.5327 | PRO1914 protein | 8.95 | 0.08 | upregulate stage |
| 436925 | AA742327 | Hs.292687 | ESTs | 1 | 1 | upregulate stage |
| 437044 | AL035864 | Hs.69517 | ESTs, Highly similar to differentially e | 1.61 | 0.5 | upregulate stage |
| 437087 | AA745563 | | gb: ny60e04.s1 NCI_CGAP_Pr18 Homo sapiens | 1 | 1 | upregulate stage |
| 437144 | AL049466 | Hs.7859 | ESTs | 1 | 0.31 | upregulate stage |
| 437170 | R49202 | Hs.181694 | ESTs | 8.7 | 0.08 | upregulate stage |
| 437181 | AI306615 | Hs.125343 | ESTs, Weakly similar to KIAA0758 protein | 4.4 | 0.05 | upregulate stage |
| 437207 | T27503 | Hs.15929 | Homo sapiens cDNA FLJ12910 fis, clone NT | 1.4 | 0.22 | upregulate stage |
| 437214 | BE092336 | | gb: IL2-BT0734-240400-072-A12 BT0734 Homo | 5.65 | 0.09 | upregulate stage |
| 437240 | AA747537 | | gb: nx85c05.s1 NCI_CGAP_GCB1 Homo sapiens | 1 | 0.45 | upregulate stage |
| 437257 | AI283085 | Hs.290931 | ESTs, Weakly similar to unknown [S. cerev | 3.8 | 0.14 | upregulate stage |
| 437258 | AL041243 | Hs.174104 | ESTs | 9.72 | 0.08 | upregulate stage |
| 437267 | AW511443 | Hs.258110 | ESTs | 4.25 | 0.12 | upregulate stage |
| 437274 | AA747965 | | gb: nx79a10.s1 NCI_CGAP_Ew1 Homo sapiens | 1 | 0.19 | upregulate stage |
| 437288 | AA748182 | Hs.160377 | ESTs | 1 | 0.61 | upregulate stage |
| 437311 | AA370041 | Hs.9456 | SWI/SNF related, matrix associated, acti | 3.1 | 0.17 | upregulate stage |
| 437324 | AL162077 | | gb: Homo sapiens mRNA; cDNA DKFZp761A219 | 1 | 0.25 | upregulate stage |
| 437330 | AL353944 | Hs.50115 | Homo sapiens mRNA; cDNA DKFZp761J1112 (f | 7.95 | 0.07 | upregulate stage |
| 437356 | BE622396 | Hs.284252 | Homo sapiens mRNA; cDNA DKFZp762O1615 (f | 1 | 1 | upregulate stage |
| 437438 | AL359620 | Hs.14217 | hypothetical protein DKPZp762P2111 | 9.15 | 0.09 | upregulate stage |
| 437471 | AL390169 | | gb: Homo sapiens mRNA; cDNA DKFZp547D064 | 1 | 1 | upregulate stage |
| 437553 | AI829935 | Hs.130497 | ESTs, Weakly similar to MAT8_HUMAN CHLOR | 1.1 | 0.56 | upregulate stage |
| 437567 | AW627990 | Hs.288954 | Homo sapiens cDNA: FLJ21466 fis, clone C | 1 | 1 | upregulate stage |
| 437575 | AW954355 | Hs.36529 | ESTs | 10.25 | 0.06 | upregulate stage |
| 437717 | AA804765 | Hs.132853 | ESTs | 1 | 0.77 | upregulate stage |
| 437722 | AW292947 | Hs.122872 | ESTs | 9.75 | 0.05 | upregulate stage |
| 437752 | AA767376 | Hs.291631 | ESTs | 6.7 | 0.08 | upregulate stage |
| 437770 | AA767881 | Hs.122897 | ESTs | 2.57 | 0.24 | upregulate stage |
| 437798 | AW811767 | | gb: RC2-ST0165-300999-011-g02 ST0165 Homo | 1 | 1 | upregulate stage |
| 437799 | R51083 | Hs.90787 | ESTs | 1 | 1 | upregulate stage |
| 437852 | BE001836 | Hs.256897 | ESTs, Weakly similar to dJ365O12.1 [H. sa | 1.77 | 0.3 | upregulate stage |
| 437886 | BE264111 | Hs.31314 | retinoblastoma-binding protein 7 | 8.8 | 0.08 | upregulate stage |
| 437887 | AA811524 | Hs.29263 | Homo sapiens cDNA FLJ11896 fis, clone HE | 3.8 | 0.17 | upregulate stage |
| 437889 | AA830524 | Hs.124357 | ESTs | 1 | 0.69 | upregulate stage |
| 437937 | AI917222 | Hs.121655 | ESTs | 1 | 0.38 | upregulate stage |
| 437938 | AI950087 | | gb: wq05c02.x1 NCI_CGAP_Kid12 Homo sapien | 1.37 | 0.52 | upregulate stage |
| 437983 | AI303023 | Hs.30211 | hypothetical protein FLJ22313 | 8.82 | 0.08 | upregulate stage |
| 438011 | BE466173 | Hs.145696 | splicing factor (CC1.3) | 9 | 0.09 | upregulate stage |
| 438032 | BE045624 | Hs.152992 | ESTs | 5.65 | 0.13 | upregulate stage |
| 438069 | N80701 | Hs.33790 | ESTs | 3.25 | 0.13 | upregulate stage |
| 438077 | AA777330 | Hs.50429 | ESTs | 1 | 1 | upregulate stage |
| 438081 | H49546 | Hs.298964 | ESTs | 3.75 | 0.11 | upregulate stage |
| 438102 | AA777793 | Hs.137580 | xylulokinase (H. inflsunzae) homolog | 1 | 1 | upregulate stage |
| 438112 | W85729 | Hs.194279 | ESTs | 1 | 0.33 | upregulate stage |
| 438113 | AI467908 | Hs.8882 | ESTs | 1.21 | 0.55 | upregulate stage |
| 438119 | AW963217 | Hs.203961 | ESTs, Moderately similar to AF116721 89 | 11.75 | 0.07 | upregulate stage |
| 438144 | AA778894 | Hs.118364 | ESTs | 1 | 1 | upregulate stage |
| 438153 | AI268632 | Hs.146159 | ESTs | 1 | 1 | upregulate stage |
| 438171 | AW976507 | Hs.293515 | ESTs | 2.82 | 0.24 | upregulate stage |
| 438271 | L21934 | Hs.14553 | sterol O-acyltransferase (acyl-Coenzyme | 1 | 1 | upregulate stage |
| 438290 | AA843719 | Hs.122341 | ESTs | 3.9 | 0.13 | upregulate stage |
| 438321 | AA576635 | Hs.6153 | CGI-48 protein | 9.4 | 0.08 | upregulate stage |
| 438325 | AA804258 | Hs.123229 | ESTs | 4.65 | 0.11 | upregulate stage |
| 438334 | AA806992 | Hs.291686 | ESTs | 1 | 1 | upregulate stage |
| 438366 | AA805760 | | gb: ns43f01.s1 NCI_CGAP_GCB1 Homo sapiens | 1 | 0.34 | upregulate stage |
| 438370 | AA843242 | Hs.48523 | ESTs | 4 | 0.14 | upregulate stage |
| 438374 | AA321866 | Hs.6193 | Homo sapiens mRNA; cDNA DKFZp434C717 (f | 1 | 0.84 | upregulate stage |
| 438377 | AA806070 | Hs.291716 | ESTs | 1 | 0.24 | upregulate stage |
| 438378 | AW970529 | Hs.86434 | Homo sapiens cDNA: FLJ21816 fis, clone H | 6.65 | 0.11 | upregulate stage |
| 438401 | AL046321 | Hs.197484 | ESTs | 1 | 1 | upregulate stage |
| 438403 | AA806607 | Hs.292206 | ESTs | 2.75 | 0.14 | upregulate stage |
| 438412 | AA806776 | Hs.130814 | ESTs | 1 | 1 | upregulate stage |
| 438448 | AA807344 | Hs.172932 | Homo sapiens mRNA for partial 3'UTR, seq | 1 | 0.34 | upregulate stage |
| 438451 | AI081972 | Hs.220261 | ESTs | 5.7 | 0.09 | upregulate stage |
| 438473 | H07986 | Hs.136901 | ESTs | 1 | 1 | upregulate stage |
| 438487 | AI684733 | Hs.88820 | HDCMC28P protein | 1 | 0.21 | upregulate stage |
| 438529 | AW007287 | Hs.28538 | Homo sapiens cDNA: FLJ21086 fis, clone C | 1 | 0.36 | upregulate stage |
| 438534 | AW204052 | Hs.123644 | ESTs | 1 | 0.37 | upregulate stage |
| 438693 | AA814369 | Hs.249595 | ESTs | 3.55 | 0.15 | upregulate stage |
| 438698 | AW297855 | Hs.125815 | ESTs | 3.12 | 0.22 | upregulate stage |
| 438728 | AA815202 | Hs.25657 | ESTs | 1 | 0.67 | upregulate stage |
| 438746 | AI885815 | Hs.184727 | ESTs | 1.5 | 0.35 | upregulate stage |
| 438805 | AA826048 | Hs.117887 | ESTs | 9.35 | 0.07 | upregulate stage |
| 438812 | AA826199 | Hs.44287 | ESTs | 1 | 0.57 | upregulate stage |
| 438817 | AI023799 | Hs.163242 | ESTs | 4.2 | 0.08 | upregulate stage |
| 438886 | AA827728 | Hs.128705 | ESTs, Weakly similar to AF149422 2 unkno | 4.05 | 0.12 | upregulate stage |
| 438913 | AI380429 | Hs.172445 | ESTs | 5.4 | 0.11 | upregulate stage |
| 438950 | H23789 | Hs.144530 | ESTs | 1 | 1 | upregulate stage |
| 438961 | H42135 | Hs.101848 | ESTs | 7.85 | 0.08 | upregulate stage |
| 438990 | AF085890 | | gb: Homo sapiens full length insert cDNA | 1 | 0.83 | upregulate stage |
| 439026 | R98978 | Hs.117767 | ESTs | 1 | 0.27 | upregulate stage |
| 439052 | AF085917 | Hs.37921 | ESTs | 1 | 0.22 | upregulate stage |
| 439057 | H59623 | Hs.271561 | ESTs | 1 | 1 | upregulate stage |
| 439176 | AI446444 | Hs.190394 | ESTs | 5.8 | 0.12 | upregulate stage |
| 439179 | AA831250 | Hs.292693 | ESTs | 1 | 1 | upregulate stage |
| 439183 | AW970600 | | gb: EST382681 MAGE resequences, MAGK Homo | 4.5 | 0.13 | upregulate stage |
| 439208 | AK000299 | Hs.180952 | dynactin p62 subunit | 11.9 | 0.06 | upregulate stage |
| 439212 | AF087995 | Hs.134877 | ESTs | 11.4 | 0.07 | upregulate stage |
| 439223 | AW238299 | Hs.23945 | ESTs | 2.79 | 0.26 | upregulate stage |
| 439312 | AA833902 | Hs.270745 | ESTs | 8.9 | 0.08 | upregulate stage |
| 439330 | AF086147 | | gb: Homo sapiens full length insert cDNA | 1 | 0.19 | upregulate stage |
| 439351 | W37688 | Hs.55158 | ESTs, Weakly similar to weak similarity | 1 | 0.31 | upregulate stage |
| 439430 | AF124250 | Hs.6564 | breast cancer anti-estrogen resistance 3 | 3.9 | 0.15 | upregulate stage |
| 439444 | AI277652 | Hs.54578 | ESTs | 11 | 0.07 | upregulate stage |
| 439453 | BE264974 | Hs.6566 | thyroid hormone receptor interactor 13 | 12.21 | 0.05 | upregulate stage |
| 439476 | AA836340 | Hs.165490 | ESTs | 1 | 0.65 | upregulate stage |
| 439492 | AF086310 | Hs.103159 | ESTs | 5.43 | 0.1 | upregulate stage |
| 439527 | AW298119 | Hs.202536 | ESTs | 5.25 | 0.1 | upregulate stage |
| 439550 | H10438 | | gb: ym08d10.s1 Scares infant brain 1NIB H | 3.2 | 0.18 | upregulate stage |
| 439560 | BE565647 | Hs.74899 | hypothetical protein FLJ12820 | 1.81 | 0.32 | upregulate stage |
| 439565 | AF086386 | Hs.145599 | ESTs | 8.96 | 0.07 | upregulate stage |
| 439592 | AF086413 | Hs.58399 | ESTs | 1 | 1 | upregulate stage |
| 439605 | AF086431 | Hs.134805 | ESTs | 9.15 | 0.09 | upregulate stage |
| 439606 | W79123 | Hs.58561 | ESTs, Weakly similar to KI01 HUMAN PROBA | 8.45 | 0.06 | upregulate stage |
| 439750 | AL359053 | Hs.57664 | Homo sapiens mRNA full length insert cDN | 5.43 | 0.14 | upregulate stage |
| 439780 | AL109688 | | gb: Homo sapiens mRNA full length insert | 5 | 0.09 | upregulate stage |
| 439851 | AI149520 | Hs.144453 | ESTs | 2.75 | 0.21 | upregulate stage |
| 439862 | AI571647 | Hs.146170 | hypothetical protein FLJ22969 | 6.3 | 0.11 | upregulate stage |
| 439926 | AW014875 | Hs.137007 | ESTs | 33.5 | 0.02 | upregulate stage |
| 439942 | AW993791 | Hs.94881 | ESTs | 9.9 | 0.08 | upregulate stage |
| 439963 | AW247529 | Hs.6793 | platelet-activating factor acetylhydrola | 5.59 | 0.15 | upregulate stage |
| 439979 | AW600291 | Hs.6823 | hypothetical protein FLJ10430 | 6.95 | 0.07 | upregulate stage |
| 439987 | AA860116 | Hs.223232 | ESTs | 2.45 | 0.17 | upregulate stage |
| 439999 | AA115811 | Hs.6838 | ras homolog gene family, member E | 8.75 | 0.07 | upregulate stage |
| 440006 | AK000517 | Hs.6844 | hypothetical protein FLJ20510 | 1.68 | 0.41 | upregulate stage |
| 440012 | AA861072 | | gb: ak32e05.s1 Soares_testis_NHT Homo sap | 1 | 1 | upregulate stage |
| 440126 | AA975145 | Hs.66194 | ESTs | 1 | 1 | upregulate stage |
| 440194 | R43809 | Hs.22688 | ESTs | 1 | 1 | upregulate stage |
| 440228 | AF125392 | Hs.7089 | insulin induced protein 2 | 1 | 1 | upregulate stage |
| 440249 | AI246590 | Hs.125325 | ESTs | 1.74 | 0.44 | upregulate stage |
| 440284 | AA912032 | Hs.181059 | ESTs | 1 | 1 | upregulate stage |
| 440334 | BE276112 | Hs.7165 | zinc finger protein 259 | 9.45 | 0.09 | upregulate stage |
| 440348 | AW015802 | Hs.47023 | ESTs | 1 | 0.33 | upregulate stage |
| 440351 | AF030933 | Hs.7179 | RAD1 (S. pombe) homolog | 3.75 | 0.16 | upregulate stage |
| 440366 | F08229 | Hs.125273 | ESTs | 3.5 | 0.12 | upregulate stage |
| 440462 | T71629 | Hs.100554 | ESTs | 1.54 | 0.52 | upregulate stage |
| 440527 | AV657117 | Hs.184164 | ESTs | 3.75 | 0.14 | upregulate stage |
| 440613 | AI733034 | Hs.137079 | ESTs | 3.9 | 0.11 | upregulate stage |
| 440705 | AA904244 | Hs.153205 | ESTs | 3.9 | 0.14 | upregulate stage |
| 440856 | AW993377 | Hs.130390 | ESTs | 8.95 | 0.09 | upregulate stage |
| 440899 | AW449445 | Hs.172690 | diacylglycerol kinase, alpha (80 kD) | 2.55 | 0.2 | upregulate stage |
| 440917 | AA909651 | Hs.160025 | ESTs | 1 | 0.17 | upregulate stage |
| 440980 | AL042005 | Hs.1117 | tripeptidyl peptidase II | 8.9 | 0.09 | upregulate stage |
| 440994 | AI160011 | Hs.193341 | ESTs | 1.29 | 0.58 | upregulate stage |
| 441092 | T99289 | Hs.126556 | EST | 4.9 | 0.11 | upregulate stage |
| 441107 | AA917075 | Hs.190520 | ESTs | 5.9 | 0.09 | upregulate stage |
| 441131 | AI733222 | Hs.126632 | ESTs | 9.55 | 0.09 | upregulate stage |
| 441143 | AI027604 | Hs.159650 | ESTs | 3.8 | 0.13 | upregulate stage |
| 441205 | AW137827 | Hs.176904 | ESTs | 4.75 | 0.12 | upregulate stage |
| 441206 | BE552314 | Hs.131823 | ESTs, Weakly similar to TERA HUMAN [H. sa | 1 | 1 | upregulate stage |
| 441264 | AA927170 | Hs.23290 | ESTs | 4.3 | 0.14 | upregulate stage |
| 441318 | AI078234 | Hs.176130 | ESTs | 1.74 | 0.45 | upregulate stage |
| 441334 | AI700529 | Hs.117964 | ESTs | 1 | 1 | upregulate stage |
| 441346 | AA931077 | Hs.186889 | Homo sapiens cDNA FLJ12021 fis, clone HE | 1 | 1 | upregulate stage |
| 441378 | AA931826 | Hs.126846 | ESTs | 4.5 | 0.1 | upregulate stage |
| 441383 | AW294408 | Hs.222068 | ESTs | 1 | 1 | upregulate stage |
| 441421 | AA356792 | Hs.301786 | ESTs | 1 | 0.24 | upregulate stage |
| 441470 | BE503874 | Hs.301986 | ESTs | 0.63 | 0.93 | upregulate stage |
| 441474 | AW274946 | Hs.144476 | ESTs | 1 | 1 | upregulate stage |
| 441484 | AA935481 | Hs.58972 | ESTs | 1 | 0.33 | upregulate stage |
| 441485 | AI792988 | Hs.189133 | ESTs | 4.25 | 0.1 | upregulate stage |
| 441508 | AW015203 | Hs.232237 | ESTs | 1 | 1 | upregulate stage |
| 441562 | AW578981 | Hs.52184 | hypothetical protein FLJ20618 | 4.05 | 0.12 | upregulate stage |
| 441599 | AW473362 | Hs.127221 | ESTs | 1 | 0.29 | upregulate stage |
| 441612 | AI802629 | Hs.113660 | Homo sapiens cDNA FLJ11631 fis, clone HE | 8.75 | 0.08 | upregulate stage |
| 441616 | BE569122 | Hs.74111 | RNA-binding protein (autoantigenic) | 1.14 | 0.71 | upregulate stage |
| 441643 | AI740504 | Hs.205128 | ESTs | 1 | 0.33 | upregulate stage |
| 441677 | AW271702 | Hs.93739 | ESTs | 1 | 0.28 | upregulate stage |
| 441693 | AA384673 | Hs.7943 | RPB5-mediating protein | 1 | 0.43 | upregulate stage |
| 441703 | AW390054 | Hs.192843 | ESTs | 9.85 | 0.08 | upregulate stage |
| 441732 | AW298818 | Hs.127341 | ESTs | 4.6 | 0.14 | upregulate stage |
| 441759 | C16126 | Hs.161377 | ESTs | 4.55 | 0.13 | upregulate stage |
| 441762 | AW592203 | Hs.144769 | ESTs | 1 | 0.83 | upregulate stage |
| 441790 | AW294909 | Hs.132208 | ESTs | 9 | 0.08 | upregulate stage |
| 441794 | AW197794 | Hs.253338 | ESTs | 4.5 | 0.12 | upregulate stage |
| 441799 | AW292276 | Hs.127872 | ESTs | 1 | 0.22 | upregulate stage |
| 441801 | AW242799 | Hs.211874 | ESTs | 8 | 0.06 | upregulate stage |
| 441904 | AI633206 | Hs.128104 | ESTs | 2 | 0.19 | upregulate stage |
| 441955 | AA972327 | Hs.142903 | ESTs | 0.87 | 0.96 | upregulate stage |
| 441989 | AA306207 | Hs.286241 | Homo sapiens cDNA: FLJ22698 fis, clone H | 9.17 | 0.07 | upregulate stage |
| 441990 | T66139 | Hs.113631 | ESTs | 3.55 | 0.12 | upregulate stage |
| 442029 | AW956698 | Hs.14456 | neural precursor cell expressed, develop | 4.65 | 0.14 | upregulate stage |
| 442030 | W67167 | Hs.109080 | ESTs | 1 | 0.35 | upregulate stage |
| 442064 | AI422867 | Hs.88594 | ESTs | 8.8 | 0.08 | upregulate stage |
| 442071 | BE048433 | Hs.276043 | ESTs | 9.15 | 0.09 | upregulate stage |
| 442093 | AA976049 | Hs.128464 | ESTs | 1 | 1 | upregulate stage |
| 442194 | AA984389 | Hs.205088 | ESTs | 1 | 0.83 | upregulate stage |
| 442202 | BE272862 | Hs.106534 | Home sapiens cDNA: FLJ22625 fis, clone H | 9.9 | 0.08 | upregulate stage |
| 442203 | AI921423 | Hs.250146 | ESTs | 1 | 1 | upregulate stage |
| 442214 | AI681733 | Hs.129003 | ESTs | 2.2 | 0.26 | upregulate stage |
| 442216 | AI733468 | Hs.129006 | ESTs | 1 | 1 | upregulate stage |
| 442295 | AI827248 | Hs.224398 | Homo sapiens cDNA FLJ11469 fis, clone HE | 1.49 | 0.31 | upregulate stage |
| 442319 | BE048144 | Hs.177677 | CGI-102 protein | 1 | 0.29 | upregulate stage |
| 442432 | BE093589 | Hs.38178 | Homo sapiens cDNA: FLJ23468 fis, clone H | 22.95 | 0.03 | upregulate stage |
| 442510 | AF150179 | Hs.249890 | ESTs | 1 | 0.63 | upregulate stage |
| 442518 | AF150226 | | gb: AF150226 Human mRNA from cd34 + stem c | 1 | 1 | upregulate stage |
| 442539 | AL119506 | Hs.58220 | Homo sapiens cDNA: FLJ23005 fis, clone L | 1 | 0.23 | upregulate stage |
| 442552 | R20624 | Hs.83572 | son of sevenless (Drosophila) homolog 1 | 9 | 0.08 | upregulate stage |
| 442562 | BE379584 | Hs.34789 | ESTs | 6.55 | 0.1 | upregulate stage |
| 442564 | AI590207 | Hs.188378 | ESTs | 1 | 1 | upregulate stage |
| 442577 | AA292998 | Hs.163900 | ESTs | 1.41 | 0.52 | upregulate stage |
| 442590 | AI002686 | Hs.130313 | ESTs | 1 | 0.36 | upregulate stage |
| 442597 | AI499214 | Hs.130825 | ESTs | 1 | 1 | upregulate stage |
| 442611 | BE077155 | Hs.177537 | ESTs | 4.35 | 0.15 | upregulate stage |
| 442612 | AI005233 | Hs.130631 | ESTs | 1 | 0.28 | upregulate stage |
| 442619 | AA447492 | Hs.20183 | ESTs, Weakly similar to AF164793 1 prote | 7.85 | 0.09 | upregulate stage |
| 442642 | R51853 | Hs.226429 | ESTs | 1 | 1 | upregulate stage |
| 442660 | AW138174 | Hs.130651 | ESTs | 4.1 | 0.09 | upregulate stage |
| 442696 | BE566962 | Hs.7063 | Homo sapiens cDNA: FLJ20913 fis, clone A | 2.65 | 0.16 | upregulate stage |
| 442712 | BE465168 | Hs.131011 | ESTs | 2.51 | 0.23 | upregulate stage |
| 442760 | BE075297 | Hs.10067 | ESTs, Weakly similar to KIAA1205 protein | 8 | 0.1 | upregulate stage |
| 442769 | AW243058 | Hs.131155 | ESTs | 1 | 0.3 | upregulate stage |
| 442785 | AW296625 | Hs.131188 | ESTs | 1 | 0.27 | upregulate stage |
| 442806 | AW294522 | Hs.149991 | ESTs | 9.6 | 0.08 | upregulate stage |
| 442856 | H56735 | Hs.282958 | Homo sapiens cDNA FLJ13611 fis, clone PL | 4.3 | 0.11 | upregulate stage |
| 442861 | AA243837 | Hs.57787 | ESTs | 3.9 | 0.12 | upregulate stage |
| 442875 | BE623003 | Hs.23625 | Homo sapiens clone TCCCTA00142 mRNA sequ | 3.85 | 0.15 | upregulate stage |
| 442879 | AF032922 | Hs.8813 | syntaxin binding protein 3 | 3.95 | 0.14 | upregulate stage |
| 442883 | AW195774 | Hs.253199 | ESTs | 1 | 1 | upregulate stage |
| 442961 | BE614474 | Hs.289074 | Homo sapiens cDNA FLJ13986 fis, clone Y7 | 11.55 | 0.07 | upregulate stage |
| 442966 | AI394036 | Hs.132237 | ESTs, Weakly similar to dual specificity | 2.95 | 0.16 | upregulate stage |
| 442980 | AA857025 | Hs.8878 | kinesin-like 1 | 1 | 0.24 | upregulate stage |
| 442992 | AI914699 | Hs.13297 | ESTs | 6.1 | 0.14 | upregulate stage |
| 442994 | AI026718 | Hs.16954 | ESTs | 8.9 | 0.07 | upregulate stage |
| 443054 | AI745185 | Hs.8939 | yes-associated protein 65 kDa | 5.7 | 0.11 | upregulate stage |
| 443113 | AI040686 | Hs.132908 | ESTs | 3.9 | 0.14 | upregulate stage |
| 443119 | AA312264 | Hs.7980 | ESTs, Moderately similar to ALU4_HUMAN A | 8.73 | 0.08 | upregulate stage |
| 443171 | BE281128 | Hs.9030 | TONDU | 3.18 | 0.22 | upregulate stage |
| 443211 | AI128388 | Hs.143655 | ESTs | 6.55 | 0.08 | upregulate stage |
| 443242 | BE243910 | Hs.9082 | nucleoporin p54 | 11.05 | 0.06 | upregulate stage |
| 443243 | AI452496 | Hs.132056 | ESTs | 8.9 | 0.09 | upregulate stage |
| 443247 | BE614387 | Hs.47378 | ESTs, Moderately similar to hypothetical | 10.95 | 0.05 | upregulate stage |
| 443270 | NM_004272 | Hs.9192 | Homer, neuronal immediate early gene, 1B | 3.75 | 0.2 | upregulate stage |
| 443299 | AI733642 | Hs.133042 | ESTs | 1 | 0.69 | upregulate stage |
| 443362 | AI053464 | Hs.166505 | ESTs | 2.9 | 0.16 | upregulate stage |
| 443383 | AI792453 | Hs.166507 | ESTs | 5 | 0.14 | upregulate stage |
| 443411 | AW134566 | Hs.65320 | ESTs | 1 | 0.59 | upregulate stage |
| 443426 | AF098158 | Hs.9329 | chromosome 20 open reading frame 1 | 2.68 | 0.31 | upregulate stage |
| 443447 | AI094222 | Hs.166572 | ESTs | 1 | 0.38 | upregulate stage |
| 443542 | AI927065 | Hs.146040 | ESTs | 5.65 | 0.13 | upregulate stage |
| 443557 | AV645987 | Hs.145681 | ESTs | 1 | 1 | upregulate stage |
| 443584 | AI807036 | Hs.101619 | ESTs | 1 | 0.36 | upregulate stage |
| 443606 | AI078664 | Hs.199424 | ESTs | 1.15 | 0.33 | upregulate stage |
| 443634 | H73972 | Hs.134460 | ESTs | 3.05 | 0.16 | upregulate stage |
| 443640 | AI872643 | Hs.134218 | ESTs | 3.65 | 0.12 | upregulate stage |
| 443715 | AI583187 | Hs.9700 | cyclin E1 | 5.65 | 0.11 | upregulate stage |
| 443799 | AA150320 | Hs.9800 | protein kinase Njmu-R1 | 1.8 | 0.19 | upregulate stage |
| 443899 | AW842283 | Hs.79933 | cyclin I | 4.65 | 0.13 | upregulate stage |
| 443917 | AW503739 | Hs.72325 | Human DNA sequence from clone RP1-187J11 | 1 | 1 | upregulate stage |
| 443919 | AI091284 | Hs.135224 | ESTs | 8.05 | 0.07 | upregulate stage |
| 443967 | AW294013 | Hs.200942 | ESTs | 5.55 | 0.13 | upregulate stage |
| 443977 | AL120986 | Hs.150627 | ESTs | 4 | 0.14 | upregulate stage |
| 443979 | AV647366 | Hs.282365 | ESTs | 1 | 1 | upregulate stage |
| 444020 | R92962 | Hs.35052 | ESTs | 10.45 | 0.08 | upregulate stage |
| 444105 | AW189097 | Hs.166597 | ESTs | 6.29 | 0.1 | upregulate stage |
| 444129 | AW294292 | Hs.256212 | ESTs | 1 | 0.77 | upregulate stage |
| 444152 | AI125694 | Hs.149305 | Homo sapiens cDNA FLJ14264 fis, clone PL | 1.64 | 0.48 | upregulate stage |
| 444163 | AI126098 | | gb: qc54g07.x1 Soares_placenta_8to9weeks_{—} | 1.12 | 0.81 | upregulate stage |
| 444166 | AV648429 | Hs.282393 | ESTs | 1 | 1 | upregulate stage |
| 444270 | AI138580 | Hs.255220 | EST | 1 | 0.47 | upregulate stage |
| 444271 | AW452569 | Hs.149804 | ESTs | 3.2 | 0.12 | upregulate stage |
| 444282 | AI138955 | | gb: qd79b07.x1 Soares_testis_NHT Homo sap | 1 | 1 | upregulate stage |
| 444333 | AI262567 | Hs.253801 | trinucleotide repeat containing 15 | 1 | 0.77 | upregulate stage |
| 444342 | NM_014398 | Hs.10887 | similar to lysosome-associated membrane | 6.9 | 0.06 | upregulate stage |
| 444378 | R41339 | Hs.12569 | ESTs | 1 | 0.32 | upregulate stage |
| 444381 | BE387335 | Hs.283713 | ESTs, Weakly similar to CA54_HUMAN COLLA | 2.85 | 0.26 | upregulate stage |
| 444431 | AW513324 | Hs.42280 | ESTs | 6.27 | 0.12 | upregulate stage |
| 444437 | AI377961 | Hs.44041 | ESTs | 9.9 | 0.07 | upregulate stage |
| 444444 | AI149332 | Hs.14855 | ESTs | 1.16 | 0.47 | upregulate stage |
| 444525 | AW593778 | Hs.259699 | ESTs | 1 | 0.5 | upregulate stage |
| 444584 | AI168422 | | gb: ok30e11.x1 Soares_NSF_F8_9W_OT_PA_P_S | 3.6 | 0.15 | upregulate stage |
| 444599 | AI174377 | Hs.143796 | ESTs | 1 | 0.44 | upregulate stage |
| 444646 | AI184565 | | gb: qd60b08.x1 Soares_testis_NHT Homo sap | 1 | 1 | upregulate stage |
| 444649 | AW207523 | Hs.197628 | ESTs | 9.35 | 0.06 | upregulate stage |
| 444675 | AI186380 | Hs.244621 | ESTs | 9.88 | 0.08 | upregulate stage |
| 444698 | AI188139 | Hs.147050 | ESTs | 1 | 0.36 | upregulate stage |
| 444743 | AA045648 | Hs.11817 | nudix (nucleoside diphosphate linked moi | 2.1 | 0.15 | upregulate stage |
| 444762 | AI733700 | Hs.143883 | ESTs | 3.9 | 0.14 | upregulate stage |
| 444781 | NM_014400 | Hs.11950 | GPI-anchored metastasis-associated prote | 1.44 | 0.53 | upregulate stage |
| 444783 | AK001468 | Hs.62180 | anillin (Drosophila Scraps homolog), act | 6.65 | 0.07 | upregulate stage |
| 444838 | AV651680 | Hs.208558 | ESTs | 4.84 | 0.14 | upregulate stage |
| 444849 | AI199438 | Hs.148480 | ESTs | 3.05 | 0.17 | upregulate stage |
| 444950 | AI950256 | Hs.224875 | ESTs | 1 | 0.51 | upregulate stage |
| 445027 | AV652692 | Hs.282498 | ESTs | 11.1 | 0.08 | upregulate stage |
| 445091 | AI652154 | Hs.147294 | ESTs | 1 | 1 | upregulate stage |
| 445098 | AL050272 | Hs.12305 | DKFZP566B183 protein | 9.75 | 0.07 | upregulate stage |
| 445101 | T75202 | Hs.12314 | Homo sapiens mRNA; cDNA DKFZp586C1019 (f | 10.9 | 0.07 | upregulate stage |
| 445250 | AI597838 | Hs.175621 | ESTs | 9.8 | 0.08 | upregulate stage |
| 445258 | AI635931 | Hs.147613 | ESTs | 3.05 | 0.13 | upregulate stage |
| 445390 | AI222165 | Hs.144923 | ESTs | 10.6 | 0.06 | upregulate stage |
| 445396 | BE181792 | | gb: QV1-HT0639-070500-193-g06 HT0639 Homo | 1 | 0.29 | upregulate stage |
| 445413 | AA151342 | Hs.12677 | CGI-147 protein | 4.65 | 0.12 | upregulate stage |
| 445436 | AI224105 | Hs.151408 | ESTs | 1.35 | 0.22 | upregulate stage |
| 445444 | AA380876 | Hs.270 | pleckstrin homology, Sec7 and coiled/coi | 10.7 | 0.07 | upregulate stage |
| 445483 | AI307150 | Hs.148845 | ESTs | 1 | 1 | upregulate stage |
| 445496 | AB007860 | Hs.12802 | development and differentiation enhancin | 12.05 | 0.06 | upregulate stage |
| 445525 | BE149866 | Hs.14831 | ESTs | 10.65 | 0.06 | upregulate stage |
| 445527 | W39694 | Hs.83286 | ESTs | 4.85 | 0.1 | upregulate stage |
| 445537 | AJ245671 | Hs.12844 | EGF-like-domain, multiple 6 | 9.7 | 0.06 | upregulate stage |
| 445546 | AW468821 | Hs.156054 | ESTs | 4.2 | 0.13 | upregulate stage |
| 445576 | AI793233 | Hs.145608 | ESTs | 1 | 0.31 | upregulate stage |
| 445623 | AI245366 | Hs.149158 | ESTs | 1 | 1 | upregulate stage |
| 445640 | AW969626 | Hs.31704 | ESTs, Weakly similar to KIAA0227 [H. sapi | 4.7 | 0.13 | upregulate stage |
| 445668 | AI557114 | Hs.181591 | EST | 1 | 0.34 | upregulate stage |
| 445766 | AI623607 | Hs.282977 | Homo sapiens cDNA FLJ13490 fis, clone PL | 1 | 0.23 | upregulate stage |
| 445770 | AL119499 | Hs.13285 | neuronal potassium channel alpha subunit | 1 | 1 | upregulate stage |
| 445778 | AA196443 | Hs.86043 | Homo sapiens cDNA FLJ13558 fis, clone PL | 9.7 | 0.07 | upregulate stage |
| 445787 | AI253167 | Hs.145395 | ESTs, Weakly similar to ALUC_HUMAN !!!! | 3.1 | 0.13 | upregulate stage |
| 445814 | H92020 | Hs.101624 | ESTs | 1 | 1 | upregulate stage |
| 445818 | BE045321 | Hs.136017 | ESTs | 1 | 1 | upregulate stage |
| 445829 | AI452457 | Hs.145526 | ESTs | 1 | 0.37 | upregulate stage |
| 445832 | AI261545 | | gb: qz30a07.x1 NCI_CGAP_Kid11 Homo sapien | 3.21 | 0.22 | upregulate stage |
| 445873 | AA250970 | Hs.251946 | Homo sapiens cDNA: FLJ23107 fis, clone L | 5.25 | 0.12 | upregulate stage |
| 445880 | AV655474 | Hs.131058 | ESTs | 1.05 | 0.27 | upregulate stage |
| 445883 | AF070559 | Hs.13413 | Homo sapiens clone 24463 mRNA sequence | 1 | 1 | upregulate stage |
| 445908 | R13580 | Hs.13436 | Homo sapiens clone 24425 mRNA sequence | 3.25 | 0.15 | upregulate stage |
| 445939 | BE018658 | Hs.141003 | Homo sapiens cDNA: FLJ21691 fis, clone C | 8.85 | 0.08 | upregulate stage |
| 446019 | AI362520 | Hs.94133 | ESTs | 9.75 | 0.08 | upregulate stage |
| 446054 | AB014537 | Hs.13604 | KIAA0637 gene product | 10.25 | 0.07 | upregulate stage |
| 446062 | AA211738 | Hs.282974 | ESTs, Weakly similar to transformation-r | 1 | 1 | upregulate stage |
| 446080 | AI221741 | Hs.117777 | ESTs | 9.75 | 0.09 | upregulate stage |
| 446082 | AI274139 | Hs.156452 | ESTs | 1.37 | 0.4 | upregulate stage |
| 446099 | T93096 | Hs.17126 | ESTs | 2.4 | 0.31 | upregulate stage |
| 446119 | D29527 | | gb: HUMNK667 Human epidermal keratinocyte | 1 | 1 | upregulate stage |
| 446120 | N26080 | Hs.43741 | ESTs | 1 | 0.31 | upregulate stage |
| 446126 | AW085909 | Hs.47413 | ESTs | 9.35 | 0.08 | upregulate stage |
| 446127 | AA333608 | Hs.13980 | ubiquitously transcribed tetratricopepti | 1 | 0.25 | upregulate stage |
| 446152 | AI292036 | Hs.150028 | ESTs | 4.7 | 0.12 | upregulate stage |
| 446196 | AI744888 | Hs.149470 | ESTs | 1 | 0.83 | upregulate stage |
| 446229 | AI744964 | Hs.14449 | KIAA1609 protein | 2.4 | 0.36 | upregulate stage |
| 446248 | AI283014 | Hs.149638 | ESTs | 1 | 1 | upregulate stage |
| 446269 | AW263155 | Hs.14559 | hypothetical protein FLJ10540 | 10.85 | 0.07 | upregulate stage |
| 446303 | X77244 | Hs.14732 | malic enzyme 1, NADP(+)-dependent cytos | 1 | 1 | upregulate stage |
| 446312 | BE087853 | | gb: QV1-BT0681-290400-181-h05 BT0681 Homo | 11.75 | 0.06 | upregulate stage |
| 446332 | AK001635 | Hs.14838 | hypothetical protein FLJ10773 | 6.45 | 0.1 | upregulate stage |
| 446356 | AI816736 | Hs.14896 | DHHC1 protein | 8.9 | 0.08 | upregulate stage |
| 446362 | AW612481 | Hs.255914 | ESTs | 7.6 | 0.1 | upregulate stage |
| 446398 | AI681317 | Hs.150074 | ESTs | 1 | 1 | upregulate stage |
| 446411 | AI298828 | Hs.153439 | ESTs | 1 | 0.37 | upregulate stage |
| 446474 | AI301227 | Hs.150186 | ESTs | 3.35 | 0.13 | upregulate stage |
| 446501 | AI302616 | Hs.150819 | ESTs | 4.25 | 0.12 | upregulate stage |
| 446507 | AA352554 | Hs.15164 | nuclear DNA-binding protein | 11.25 | 0.06 | upregulate stage |
| 446526 | H89616 | Hs.296290 | Homo sapiens cDNA FLJ13357 fis, clone PL | 10.25 | 0.07 | upregulate stage |
| 446555 | AV659046 | Hs.201847 | ESTs | 1 | 1 | upregulate stage |
| 446577 | AB040933 | Hs.15420 | KIAA1500 protein | 1 | 0.51 | upregulate stage |
| 446629 | AI436046 | Hs.156148 | Homo sapiens cDNA: FLJ23082 fis, clone L | 1 | 0.25 | upregulate stage |
| 446636 | AC002563 | Hs.15767 | citron (rho-interacting, serine/threonin | 2.54 | 0.28 | upregulate stage |
| 446682 | AW205632 | Hs.211198 | ESTs | 4 | 0.18 | upregulate stage |
| 446701 | AK001621 | Hs.15921 | hypothetical protein FLJ10759 | 1.32 | 0.69 | upregulate stage |
| 446718 | AV660019 | Hs.282676 | ESTs | 1 | 1 | upregulate stage |
| 446719 | W39500 | Hs.47305 | ESTs, Weakly similar to LONN_HUMAN MITOC | 9.65 | 0.07 | upregulate stage |
| 446720 | AI439136 | Hs.140546 | ESTs | 4.55 | 0.12 | upregulate stage |
| 446765 | AV660348 | Hs.282688 | ESTs | 1 | 0.91 | upregulate stage |
| 446771 | AA128965 | Hs.60679 | TATA box binding protein (TBP)-associate | 11.2 | 0.06 | upregulate stage |
| 446821 | W03766 | Hs.301482 | ESTs | 8.9 | 0.09 | upregulate stage |
| 446830 | BE179030 | Hs.64239 | Human DNA sequence from clone RP5-1174N9 | 10.65 | 0.07 | upregulate stage |
| 446839 | BE091926 | Hs.16244 | mitotic spindle coiled-coil related prot | 14.05 | 0.05 | upregulate stage |
| 446853 | AV660630 | Hs.87627 | disrupter of silencing 10 | 9.7 | 0.09 | upregulate stage |
| 446880 | AI811807 | Hs.108646 | Homo sapiens cDNA FLJ12534 fis, clone NT | 11.05 | 0.06 | upregulate stage |
| 446922 | BE175605 | | gb: RC5-HT0580-100500-022-H07 HT0580 Homo | 2.75 | 0.16 | upregulate stage |
| 446950 | AA305800 | Hs.293454 | ESTs, Weakly similar to Similarity to Ye | 9.6 | 0.06 | upregulate stage |
| 446988 | AW339533 | Hs.272108 | ESTs | 1 | 0.29 | upregulate stage |
| 446989 | AK001898 | Hs.16740 | hypothetical protein FLJ11036 | 1.75 | 0.51 | upregulate stage |
| 447052 | AV661911 | Hs.282735 | ESTs | 1 | 1 | upregulate stage |
| 447065 | AI829014 | Hs.158678 | ESTs | 1 | 0.25 | upregulate stage |
| 447069 | AI359927 | Hs.157722 | ESTs | 1 | 0.4 | upregulate stage |
| 447078 | AW885727 | Hs.301570 | ESTs | 4.4 | 0.13 | upregulate stage |
| 447080 | AI418781 | Hs.300144 | ESTs | 1 | 0.31 | upregulate stage |
| 447081 | Y13896 | Hs.17287 | potassium inwardly-rectifying channel, s | 3.55 | 0.12 | upregulate stage |
| 447118 | AB014599 | Hs.17411 | KIAA0699 protein | 10.15 | 0.07 | upregulate stage |
| 447153 | AA805202 | Hs.173912 | eukaryotic translation initiation factor | 6.2 | 0.12 | upregulate stage |
| 447154 | H52284 | Hs.293545 | ESTs | 1 | 0.24 | upregulate stage |
| 447159 | AI685286 | Hs.280386 | EST | 1.25 | 0.25 | upregulate stage |
| 447215 | BE617056 | Hs.283000 | ESTs | 2.4 | 0.16 | upregulate stage |
| 447228 | AW192200 | Hs.158188 | ESTs | 1 | 0.29 | upregulate stage |
| 447258 | BE047911 | | gb: tz44a05.y1 NCI_CGAP_Brn52 Homo sapien | 1.15 | 0.23 | upregulate stage |
| 447286 | AW197097 | Hs.183858 | transcriptional intermediary factor 1 | 1 | 1 | upregulate stage |
| 447289 | AW247017 | Hs.36978 | melanoma antigen, family A, 3 | 1 | 1 | upregulate stage |
| 447334 | AA515032 | Hs.91109 | ESTs | 9.15 | 0.08 | upregulate stage |
| 447342 | AI199268 | Hs.19322 | ESTs | 5.95 | 0.09 | upregulate stage |
| 447343 | AA256641 | Hs.236894 | ESTs, Highly similar to LRP1_HUMAN LOW-D | 2.11 | 0.33 | upregulate stage |
| 447376 | AI376747 | | gb: tc35h05.x1 Soares_total_fetus_Nb2HF8_{—} | 1 | 0.33 | upregulate stage |
| 447397 | BE247676 | Hs.18442 | E-1 enzyme | 5.3 | 0.14 | upregulate stage |
| 447430 | AI742989 | Hs.206112 | ESTs | 3.65 | 0.13 | upregulate stage |
| 447444 | AK000318 | Hs.18616 | hypothetical protein FLJ20311 | 9.2 | 0.08 | upregulate stage |
| 447519 | U46258 | Hs.23448 | ESTs | 14.4 | 0.05 | upregulate stage |
| 447522 | BE143888 | | gb: MR0-HT0165-081199-001-b04 HT0165 Homo | 1.7 | 0.18 | upregulate stage |
| 447578 | AA912347 | Hs.136585 | ESTs | 1.5 | 0.3 | upregulate stage |
| 447606 | AI588954 | Hs.170995 | ESTs | 2.7 | 0.16 | upregulate stage |
| 447688 | N87079 | Hs.19236 | NADH dehydrogenase (ubiquinone) 1 beta s | 4.55 | 0.12 | upregulate stage |
| 447701 | BE619526 | Hs.255527 | ESTs, Weakly similar to unnamed protein | 1.63 | 0.46 | upregulate stage |
| 447741 | AI421737 | Hs.167253 | ESTs | 1 | 1 | upregulate stage |
| 447748 | AI422023 | Hs.161338 | ESTs | 3.9 | 0.11 | upregulate stage |
| 447827 | U73727 | Hs.19718 | protein tyrosine phosphatase, receptor t | 1.44 | 0.59 | upregulate stage |
| 447881 | BE620886 | Hs.23037 | ESTs | 12.15 | 0.06 | upregulate stage |
| 447963 | AI452973 | Hs.165900 | ESTs, Weakly similar to ALUC_HUMAN !!!! | 8.9 | 0.08 | upregulate stage |
| 447977 | AI457097 | Hs.255906 | ESTs | 1 | 1 | upregulate stage |
| 447978 | AI457098 | Hs.280848 | ESTs | 1 | 1 | upregulate stage |
| 447982 | H22953 | Hs.137551 | ESTs | 4.25 | 0.13 | upregulate stage |
| 448032 | AW511770 | Hs.246868 | ESTs | 1 | 1 | upregulate stage |
| 448045 | AJ297436 | Hs.20166 | prostate stem cell antigen | 2.22 | 0.29 | upregulate stage |
| 448058 | AI458998 | Hs.170424 | ESTs | 1 | 0.51 | upregulate stage |
| 448062 | AW295923 | Hs.255472 | ESTs | 5.9 | 0.08 | upregulate stage |
| 448138 | AW847925 | Hs.170736 | ESTs | 1 | 1 | upregulate stage |
| 448154 | AL120320 | Hs.203230 | ESTs | 9.85 | 0.07 | upregulate stage |
| 448165 | NM_005591 | Hs.202379 | meiotic recombination (S. cerivisiae) 11 | 7.3 | 0.09 | upregulate stage |
| 448168 | AW605999 | Hs.22549 | hypothetical protein FLJ12799 | 1 | 0.77 | upregulate stage |
| 448236 | AA890449 | Hs.20766 | oxysterol 7alpha-hydroxylase | 1 | 0.47 | upregulate stage |
| 448256 | BE614149 | Hs.20814 | CGI-27 protein | 11.95 | 0.07 | upregulate stage |
| 448289 | AW390251 | Hs.202402 | ESTs | 1 | 0.47 | upregulate stage |
| 448356 | AL120837 | Hs.20993 | high-glucose-regulated protein 8 | 11 | 0.07 | upregulate stage |
| 448357 | N20169 | Hs.108923 | ESTs | 1.34 | 0.61 | upregulate stage |
| 448408 | AA322866 | Hs.21107 | neuroligin | 1.7 | 0.24 | upregulate stage |
| 448455 | AI252625 | Hs.269860 | ESTs | 8.8 | 0.09 | upregulate stage |
| 448459 | AW069838 | Hs.171055 | ESTs | 1 | 0.27 | upregulate stage |
| 448464 | AI522053 | Hs.196093 | ESTs | 10.35 | 0.06 | upregulate stage |
| 448468 | BE550361 | Hs.171072 | ESTs | 1 | 1 | upregulate stage |
| 448502 | AW805285 | Hs.239699 | ESTs | 9.3 | 0.08 | upregulate stage |
| 448552 | AW973653 | Hs.20104 | hypothetical protein FLJ00052 | 4.75 | 0.13 | upregulate stage |
| 448556 | AW885606 | Hs.5064 | ESTs | 9.8 | 0.08 | upregulate stage |
| 448569 | BE382657 | Hs.21486 | signal transducer and activator of trans | 2.14 | 0.35 | upregulate stage |
| 448632 | BE614269 | | gb: 601504311T1 NIH_MGC_71 Homo sapiens c | 1 | 1 | upregulate stage |
| 448643 | AI557531 | | gb: pt2.1-06.D06.r tumor2 Homo sapiens cD | 3.6 | 0.14 | upregulate stage |
| 448649 | T94590 | Hs.222855 | ESTs | 1.95 | 0.21 | upregulate stage |
| 448663 | BE614599 | Hs.106823 | H. sapiens gene from PAC 426I6, similar t | 4.3 | 0.12 | upregulate stage |
| 448680 | AW245890 | Hs.21753 | JM5 protein | 0.97 | 0.93 | upregulate stage |
| 448725 | AA193251 | Hs.40289 | ESTs | 2.6 | 0.19 | upregulate stage |
| 448729 | BE614535 | Hs.138580 | ESTs, Weakly similar to ALU5_HUMAN ALU S | 3.25 | 0.16 | upregulate stage |
| 448743 | AB032962 | Hs.21896 | KIAA1136 protein | 1.9 | 0.19 | upregulate stage |
| 448826 | AI580252 | Hs.293246 | ESTs, Weakly similar to putative p150 [H | 1.78 | 0.44 | upregulate stage |
| 448914 | AI927656 | Hs.196459 | ESTs | 2.75 | 0.19 | upregulate stage |
| 448946 | AI652855 | Hs.155796 | ESTs | 9.7 | 0.07 | upregulate stage |
| 448958 | AB020651 | Hs.22653 | KIAA0844 protein | 1 | 0.18 | upregulate stage |
| 448974 | AL049390 | Hs.22689 | Homo sapiens mRNA; cDNA DKFZp586O1318 (f | 5.85 | 0.11 | upregulate stage |
| 448979 | AI611378 | Hs.192610 | ESTs | 1 | 1 | upregulate stage |
| 449008 | AW578003 | Hs.22826 | tropomodulin 3 (ubiquitous) | 5.2 | 0.11 | upregulate stage |
| 449032 | AA045573 | Hs.22900 | nuclear factor (erythroid-derived 2)-lik | 1 | 0.33 | upregulate stage |
| 449053 | AI625777 | Hs.270344 | ESTs | 5.73 | 0.12 | upregulate stage |
| 449057 | AB037784 | Hs.22941 | KIAA1363 protein | 9.25 | 0.07 | upregulate stage |
| 449148 | AW836677 | Hs.287564 | Homo sapiens cDNA FLJ13345 fis, clone OV | 7.2 | 0.09 | upregulate stage |
| 449203 | AI634578 | Hs.282121 | ESTs | 7 | 0.1 | upregulate stage |
| 449207 | AL044222 | Hs.23255 | nucleoporin 155 kD | 2.34 | 0.36 | upregulate stage |
| 449219 | AI637581 | Hs.195012 | ESTs | 1 | 1 | upregulate stage |
| 449230 | BE613348 | Hs.23348 | S-phase kinase-associated protein 2 (p45 | 3.08 | 0.25 | upregulate stage |
| 449246 | AW411209 | Hs.23363 | hypothetical protein FLJ10983 | 4.79 | 0.16 | upregulate stage |
| 449318 | AW236021 | Hs.108788 | ESTs, Weakly similar to zeste [D. melanog | 2.8 | 0.16 | upregulate stage |
| 449328 | AI962493 | Hs.197647 | ESTs | 2.55 | 0.17 | upregulate stage |
| 449343 | AI151418 | Hs.272458 | protein phosphatase 3 (formerly 2B), cat | 4.75 | 0.12 | upregulate stage |
| 449344 | AI640355 | | gb: wa17c04.x1 NCI_CGAP_Kid11 Homo sapien | 2.1 | 0.22 | upregulate stage |
| 449351 | AW016537 | Hs.200760 | ESTs | 2.45 | 0.14 | upregulate stage |
| 449370 | AK002114 | Hs.23495 | hypothetical protein FLJ11252 | 1.55 | 0.14 | upregulate stage |
| 449424 | AW448937 | Hs.197030 | ESTs | 4.05 | 0.12 | upregulate stage |
| 449425 | AW103433 | Hs.195684 | ESTs | 4.6 | 0.12 | upregulate stage |
| 449434 | AW294858 | Hs.197641 | ESTs | 1 | 0.29 | upregulate stage |
| 449437 | AI702038 | Hs.100057 | Homo sapiens cDNA: FLJ22902 fis, clone K | 2.38 | 0.34 | upregulate stage |
| 449474 | AA019344 | Hs.2055 | ubiquitin-activating enzyme E1 (A1S9T an | 5.9 | 0.12 | upregulate stage |
| 449523 | NM_000579 | Hs.54443 | chemokine (C-C motif) receptor 5 | 6.45 | 0.1 | upregulate stage |
| 449528 | H63337 | Hs.38178 | Homo sapiens cDNA: FLJ23468 fis, clone H | 2.85 | 0.18 | upregulate stage |
| 449565 | AI824925 | Hs.197066 | ESTs | 1 | 1 | upregulate stage |
| 449568 | AL157479 | Hs.23740 | KIAA1598 protein | 10.15 | 0.06 | upregulate stage |
| 449618 | AI076459 | Hs.14366 | Homo sapiens cDNA FLJ12819 fis, clone NT | 11.7 | 0.06 | upregulate stage |
| 449639 | AA001968 | Hs.59956 | ESTs, Highly similar to MGR7_HUMAN METAB | 1 | 1 | upregulate stage |
| 449666 | AA002047 | | gb: zh84e05.r1 Soares_fetal_liver_spleen_{—} | 1.85 | 0.33 | upregulate stage |
| 449704 | AK000733 | Hs.23900 | GTPase activating protein | 2.82 | 0.3 | upregulate stage |
| 449722 | BE280074 | Hs.23960 | cyclin B1 | 6.44 | 0.12 | upregulate stage |
| 449764 | N93104 | Hs.54895 | ESTs, Weakly similar to ZNF91L [H. sapien | 1 | 1 | upregulate stage |
| 449784 | AW161319 | Hs.12915 | ESTs | 6.25 | 0.11 | upregulate stage |
| 449829 | N51440 | Hs.47261 | ESTs | 1 | 0.57 | upregulate stage |
| 449843 | R85337 | Hs.24030 | solute carrier family 31 (copper transpo | 10.2 | 0.07 | upregulate stage |
| 449892 | N73608 | Hs.50309 | ESTs | 6.5 | 0.1 | upregulate stage |
| 449894 | AK001578 | Hs.24129 | hypothetical protein FLJ10716 | 4.55 | 0.12 | upregulate stage |
| 449919 | AI674685 | Hs.200141 | ESTs | 5.3 | 0.11 | upregulate stage |
| 450020 | AI680684 | Hs.282219 | ESTs | 1 | 1 | upregulate stage |
| 450033 | R43010 | Hs.269452 | ESTs, Weakly similar to JH0148 nucleolin | 1 | 0.65 | upregulate stage |
| 450063 | AI681509 | Hs.277133 | ESTs | 4.2 | 0.17 | upregulate stage |
| 450083 | AA131795 | Hs.142001 | ESTs | 3.9 | 0.16 | upregulate stage |
| 450116 | AA005355 | Hs.222882 | ESTs | 1 | 1 | upregulate stage |
| 450121 | AL040174 | Hs.288927 | Homo sapiens cDNA: FLJ22944 fis, clone K | 1 | 1 | upregulate stage |
| 450135 | AI810816 | Hs.201142 | ESTs | 4.95 | 0.14 | upregulate stage |
| 450144 | T63961 | Hs.301851 | ESTs | 2.75 | 0.13 | upregulate stage |
| 450149 | AW969781 | Hs.293440 | ESTs, Moderately similar to ZIC2 protein | 3.75 | 0.14 | upregulate stage |
| 450151 | AI088196 | Hs.295233 | ESTs | 2.51 | 0.28 | upregulate stage |
| 450152 | AI138635 | Hs.22968 | ESTs | 2.45 | 0.15 | upregulate stage |
| 450195 | AA007352 | Hs.256042 | ESTs | 4.1 | 0.14 | upregulate stage |
| 450221 | AA328102 | Hs.24641 | cytoskeleton associated protein 2 | 1 | 0.3 | upregulate stage |
| 450238 | T89693 | Hs.138777 | ESTs | 12.2 | 0.07 | upregulate stage |
| 450257 | AW820313 | | gb: QV2-ST0296-150200-028-d02 ST0296 Homo | 1 | 1 | upregulate stage |
| 450313 | AI038989 | Hs.24809 | hypothetical protein FLJ10826 | 4.35 | 0.15 | upregulate stage |
| 450314 | AA574309 | Hs.283402 | TCR eta | 10.1 | 0.07 | upregulate stage |
| 450350 | T97817 | Hs.174880 | ESTs | 3.65 | 0.1 | upregulate stage |
| 450411 | D61167 | Hs.202156 | ESTs | 1 | 0.67 | upregulate stage |
| 450447 | AF212223 | Hs.25010 | hypothetical protein P15-2 | 10.75 | 0.07 | upregulate stage |
| 450448 | D54299 | Hs.36244 | ESTs | 1 | 1 | upregulate stage |
| 450449 | AI696596 | Hs.202068 | ESTs | 1 | 1 | upregulate stage |
| 450506 | NM_004460 | Hs.418 | fibroblast activation protein, alpha | 11.45 | 0.05 | upregulate stage |
| 450573 | AW964334 | | gb: EST376407 MAGE resequences, MAGH Homo | 1.2 | 0.2 | upregulate stage |
| 450628 | AW382884 | Hs.204715 | ESTs | 4.95 | 0.13 | upregulate stage |
| 450636 | AI703076 | Hs.201959 | ESTs | 1 | 0.69 | upregulate stage |
| 450655 | AI707846 | Hs.279860 | hypothetical protein FLJ20030 | 1 | 1 | upregulate stage |
| 450664 | AA808358 | Hs.36830 | ESTs | 1 | 0.34 | upregulate stage |
| 450680 | AF131784 | Hs.25318 | Homo sapiens clone 25194 mRNA sequence | 9.51 | 0.09 | upregulate stage |
| 450722 | AI732318 | Hs.101120 | ESTs | 1 | 0.87 | upregulate stage |
| 450751 | AI733251 | Hs.126853 | ESTs, Weakly similar to JU0033 hypotheti | 1 | 1 | upregulate stage |
| 450772 | BE326391 | Hs.280146 | ESTs, Weakly similar to JU0033 hypotheti | 1 | 1 | upregulate stage |
| 450800 | BE395161 | Hs.243963 | ESTs, Weakly similar to ALU5_HUMAN ALU S | 8.7 | 0.08 | upregulate stage |
| 450824 | R09055 | Hs.269204 | ESTs | 3.03 | 0.22 | upregulate stage |
| 450832 | AW970602 | Hs.105421 | ESTs | 6.15 | 0.08 | upregulate stage |
| 450870 | AA011471 | | gb: zi01h08.r1 Soares_fetal_liver_spleen_{—} | 1.15 | 0.23 | upregulate stage |
| 450937 | R49131 | Hs.26267 | ATP-dependant interferon response protei | 9.75 | 0.08 | upregulate stage |
| 450983 | AA305384 | Hs.25740 | ERO1 (S. cerivisiae)-like | 3.32 | 0.26 | upregulate stage |
| 451052 | AA281504 | Hs.24444 | ESTs, Moderately similar to ALUE_HUMAN ! | 9.25 | 0.08 | upregulate stage |
| 451067 | BE172186 | Hs.180789 | S164 protein | 2.8 | 0.21 | upregulate stage |
| 451088 | AA015600 | Hs.82415 | ESTs | 1 | 0.32 | upregulate stage |
| 451094 | AI949825 | Hs.260395 | ESTs | 4.45 | 0.14 | upregulate stage |
| 451096 | BE383234 | Hs.25925 | Homo sapiens clone 23860 mRNA sequence | 4.15 | 0.14 | upregulate stage |
| 451126 | H30600 | Hs.40910 | ESTs | 1 | 1 | upregulate stage |
| 451161 | AA211329 | Hs.26006 | hypothetical protein FLJ10559 | 2.15 | 0.16 | upregulate stage |
| 451166 | T98171 | Hs.185675 | ESTs | 9.26 | 0.08 | upregulate stage |
| 451222 | AA018386 | Hs.64341 | ESTs | 1 | 0.36 | upregulate stage |
| 451225 | AI433694 | Hs.293608 | ESTs | 9.19 | 0.08 | upregulate stage |
| 451228 | AI767166 | Hs.207025 | ESTs | 1 | 1 | upregulate stage |
| 451246 | AW189232 | Hs.39140 | cutaneous T-cell lymphoma tumor antigen | 7.35 | 0.11 | upregulate stage |
| 451266 | AA016292 | Hs.290849 | ESTs | 1 | 0.33 | upregulate stage |
| 451276 | AW294386 | Hs.236533 | ESTs, Highly similar to dJ742C19.2 [H. sa | 1 | 1 | upregulate stage |
| 451277 | AK001123 | Hs.26176 | hypothetical protein FLJ10261 | 11.7 | 0.06 | upregulate stage |
| 451291 | R39288 | Hs.6702 | ESTs | 1 | 1 | upregulate stage |
| 451326 | AW296946 | Hs.300967 | ESTs | 10.55 | 0.07 | upregulate stage |
| 451347 | AI288679 | Hs.101139 | ESTs | 1 | 1 | upregulate stage |
| 451359 | H85334 | | gb: ys90e05.r1 Soares retina N2b5HR Homo | 2.7 | 0.15 | upregulate stage |
| 451365 | AI791783 | | gb: op20h10.y5 NCI_CGAP_Co12 Homo sapiens | 8.9 | 0.09 | upregulate stage |
| 451386 | AB029006 | Hs.26334 | spastic paraplegia 4 (autosomal dominant | 2.45 | 0.19 | upregulate stage |
| 451440 | AA017599 | Hs.293817 | ESTs | 1 | 1 | upregulate stage |
| 451487 | AA018072 | | gb: ze51g02.r1 Soares retina N2b4HR Homo | 5.7 | 0.1 | upregulate stage |
| 451492 | AA018119 | Hs.297824 | ESTs, Highly similar to CIK1_HUMAN VOLTA | 1 | 1 | upregulate stage |
| 451495 | H86887 | | gb: yt07a01.r1 Soares retina N2b5HR Homo | 4.25 | 0.13 | upregulate stage |
| 451535 | AW970577 | | gb: EST382658 MAGE resequences, MAGK Homo | 6.8 | 0.12 | upregulate stage |
| 451553 | AA018454 | Hs.269211 | ESTs, Weakly similar to B34087 hypotheti | 1 | 1 | upregulate stage |
| 451562 | H04150 | Hs.107708 | ESTs | 4.65 | 0.11 | upregulate stage |
| 451580 | AW138195 | Hs.184326 | CDC10 (cell division cycle 10, S. cerevi | 1 | 0.42 | upregulate stage |
| 451592 | AI805416 | Hs.213897 | ESTs | 2.8 | 0.17 | upregulate stage |
| 451651 | AI097337 | Hs.88977 | hypothetical protein dJ511E16.2 | 1 | 0.18 | upregulate stage |
| 451658 | AW195351 | Hs.250520 | ESTs | 9.55 | 0.07 | upregulate stage |
| 451684 | AF216751 | Hs.26813 | CDA14 | 3.7 | 0.15 | upregulate stage |
| 451690 | AW451469 | Hs.209990 | ESTs | 10.86 | 0.07 | upregulate stage |
| 451724 | AI903765 | | gb: UI-BT037-301298-102 BT037 Homo sapien | 8.85 | 0.09 | upregulate stage |
| 451743 | AW074266 | Hs.23071 | ESTs | 2.17 | 0.35 | upregulate stage |
| 451794 | AA019799 | Hs.111911 | ESTs | 1 | 1 | upregulate stage |
| 451844 | T61430 | | gb: yc06a03.s1 Stratagene lung (937210) H | 6.5 | 0.11 | upregulate stage |
| 451903 | W19617 | Hs.261003 | ESTs, Moderately similar to B34087 hypot | 2.2 | 0.21 | upregulate stage |
| 451914 | AI822115 | Hs.270618 | ESTs, Weakly similar to KIAA0822 protein | 11.67 | 0.07 | upregulate stage |
| 451938 | AI354355 | Hs.16697 | down-regulator of transcription 1, TBP-b | 11.65 | 0.06 | upregulate stage |
| 451939 | U80456 | Hs.27311 | single-minded (Drosophila) homolog 2 | 1 | 0.95 | upregulate stage |
| 451971 | AA021185 | Hs.226306 | ESTs | 1 | 1 | upregulate stage |
| 451998 | AW594129 | Hs.213666 | ESTs | 1 | 0.26 | upregulate stage |
| 452028 | AK001859 | Hs.27595 | hypothetical protein FLJ10997 | 1 | 0.21 | upregulate stage |
| 452036 | NM_003966 | Hs.27621 | sema domain, seven thrombospondin repeat | 1.76 | 0.41 | upregulate stage |
| 452099 | BE612992 | Hs.27931 | hypothetical protein FLJ10607 similar to | 8.9 | 0.07 | upregulate stage |
| 452122 | AF216833 | Hs.1710 | ATP-binding cassette, sub-family B (MDR/ | 1 | 0.47 | upregulate stage |
| 452163 | AI863140 | | gb: tz43h12.x1 NCI_CGAP_Bm52 Homo sapien | 1 | 0.2 | upregulate stage |
| 452179 | H16725 | Hs.27463 | ESTs | 3 | 0.13 | upregulate stage |
| 452198 | AI097560 | Hs.61210 | ESTs | 1 | 0.28 | upregulate stage |
| 452206 | AW340281 | Hs.33074 | ESTs, Moderately similar to ALU1_HUMAN A | 12.4 | 0.07 | upregulate stage |
| 452234 | AW084176 | Hs.223296 | ESTs | 6.8 | 0.09 | upregulate stage |
| 452240 | AI591147 | Hs.61232 | ESTs | 3.75 | 0.07 | upregulate stage |
| 452247 | AL137432 | Hs.28564 | hypothetical protein DKFZp761E1824 | 3.9 | 0.15 | upregulate stage |
| 452250 | BE618654 | Hs.28607 | hypothetical protein A-211C6.1 | 8.75 | 0.09 | upregulate stage |
| 452256 | AK000933 | Hs.28661 | Homo sapiens cDNA FLJ10071 fis, clone HE | 5.2 | 0.09 | upregulate stage |
| 452266 | AI767250 | Hs.165240 | ESTs | 10.45 | 0.06 | upregulate stage |
| 452277 | AL049013 | Hs.28783 | KIAA1223 protein | 8.9 | 0.05 | upregulate stage |
| 452281 | T93500 | Hs.28792 | Homo sapiens cDNA FLJ11041 fis, clone PL | 8.2 | 0.04 | upregulate stage |
| 452291 | AF015592 | Hs.28853 | CDC7 (cell division cycle 7, S. cerevisi | 3.5 | 0.13 | upregulate stage |
| 452328 | AA805679 | Hs.61271 | ESTs | 3.5 | 0.14 | upregulate stage |
| 452331 | AA598509 | Hs.29117 | H. sapiens mRNA for pur alpha extended 3′ | 11.75 | 0.07 | upregulate stage |
| 452345 | AA293279 | Hs.29173 | hypothetical protein FLJ20515 | 1.08 | 0.73 | upregulate stage |
| 452367 | U71207 | Hs.29279 | eyes absent (Drosophila) homolog 2 | 10.15 | 0.07 | upregulate stage |
| 452401 | NM_007115 | Hs.29352 | tumor necrosis factor, alpha-induced pro | 1 | 0.17 | upregulate stage |
| 452404 | AW450675 | Hs.212709 | ESTs | 3.63 | 0.2 | upregulate stage |
| 452430 | AF118083 | Hs.29494 | PRO1912 protein | 1 | 0.41 | upregulate stage |
| 452436 | BE077546 | Hs.31447 | ESTs | 10 | 0.07 | upregulate stage |
| 452457 | AW062499 | | gb: MR0-CT0065-100899-001-d02 CT0065 Homo | 1 | 0.13 | upregulate stage |
| 452461 | N78223 | Hs.108106 | transcription factor | 8.1 | 0.06 | upregulate stage |
| 452518 | AA280722 | Hs.24758 | ESTs | 9.3 | 0.08 | upregulate stage |
| 452519 | BE006701 | | gb: RC0-BN0132-270300-021-a03 BN0132 Homo | 1 | 0.19 | upregulate stage |
| 452524 | AW136499 | Hs.29796 | Homo sapiens mRNA; cDNA DKFZp434D1319 (f | 1 | 0.45 | upregulate stage |
| 452531 | AA429462 | Hs.293946 | ESTs | 2.94 | 0.22 | upregulate stage |
| 452547 | AA335295 | Hs.74120 | adipose specific 2 | 1.51 | 0.53 | upregulate stage |
| 452560 | BE077084 | | gb: RC5-BT0603-220200-013-C07 BT0603 Homo | 5.35 | 0.11 | upregulate stage |
| 452571 | W31518 | Hs.34665 | ESTs | 2.55 | 0.11 | upregulate stage |
| 452607 | AI160029 | Hs.61438 | ESTs | 4.75 | 0.11 | upregulate stage |
| 452677 | BE167202 | Hs.212065 | ESTs | 1 | 0.32 | upregulate stage |
| 452680 | AW138410 | Hs.45051 | ESTs | 1 | 1 | upregulate stage |
| 452724 | R84810 | Hs.30464 | cyclin E2 | 1 | 0.27 | upregulate stage |
| 452738 | AL133800 | | gb: DKFZp761A0614_r1 761 (synonym: hamy2) | 3.45 | 0.15 | upregulate stage |
| 452741 | BE392914 | Hs.30503 | Homo sapiens cDNA FLJ11344 fis, clone PL | 3.05 | 0.16 | upregulate stage |
| 452747 | BE153855 | Hs.61460 | ESTs | 2.54 | 0.28 | upregulate stage |
| 452761 | BE244742 | Hs.30532 | CGI-77 protein | 3.85 | 0.14 | upregulate stage |
| 452825 | AI921523 | | gb: wo26d09.x1 NCI_CGAP_Gas4 Homo sapiens | 1 | 1 | upregulate stage |
| 452831 | AW864089 | Hs.135145 | ESTs | 2.4 | 0.19 | upregulate stage |
| 452846 | AA082160 | Hs.204295 | ESTs | 8.9 | 0.08 | upregulate stage |
| 452850 | H23230 | Hs.22481 | ESTs | 4.75 | 0.14 | upregulate stage |
| 452859 | AI300555 | Hs.288158 | Homo sapiens cDNA: FLJ23591 fis, clone L | 9.15 | 0.08 | upregulate stage |
| 452862 | AW378065 | Hs.8687 | ESTs | 5.95 | 0.07 | upregulate stage |
| 452899 | M96739 | Hs.30956 | Human NSCL-1 mRNA sequence | 1.04 | 0.9 | upregulate stage |
| 452902 | AI926501 | Hs.249729 | ESTs | 6.8 | 0.1 | upregulate stage |
| 452909 | NM_015368 | Hs.30985 | pannexin 1 | 5.6 | 0.1 | upregulate stage |
| 452931 | AW190011 | Hs.158006 | hypothetical protein | 1 | 0.53 | upregulate stage |
| 452934 | AA581322 | Hs.4213 | ESTs | 1.44 | 0.55 | upregulate stage |
| 452956 | AW003578 | Hs.231872 | ESTs | 1 | 0.22 | upregulate stage |
| 452974 | BE090803 | Hs.61506 | ESTs | 1.75 | 0.18 | upregulate stage |
| 453011 | N62952 | Hs.46473 | ESTs | 1 | 1 | upregulate stage |
| 453050 | AW136479 | Hs.224046 | ESTs | 1 | 0.39 | upregulate stage |
| 453074 | AA031813 | Hs.271880 | ESTs | 1 | 1 | upregulate stage |
| 453076 | AI978583 | Hs.232161 | ESTs | 3.75 | 0.14 | upregulate stage |
| 453123 | AI953718 | Hs.221849 | ESTs | 6.6 | 0.11 | upregulate stage |
| 453134 | AA032211 | Hs.118493 | ESTs | 1.68 | 0.42 | upregulate stage |
| 453135 | T07866 | Hs.31834 | Homo sapiens clone 25129 mRNA sequence | 1 | 1 | upregulate stage |
| 453137 | AI954733 | Hs.223640 | ESTs | 1 | 0.51 | upregulate stage |
| 453144 | AW268807 | Hs.61646 | ESTs | 1 | 0.26 | upregulate stage |
| 453153 | N53893 | Hs.24360 | ESTs | 5 | 0.13 | upregulate stage |
| 453156 | BE463762 | Hs.223784 | ESTs | 2.8 | 0.15 | upregulate stage |
| 453204 | R10799 | Hs.191990 | ESTs | 9.5 | 0.05 | upregulate stage |
| 453228 | AW628325 | Hs.232327 | ESTs | 1 | 1 | upregulate stage |
| 453274 | AA018511 | Hs.32769 | Homo sapiens mRNA full length insert cDN | 1 | 1 | upregulate stage |
| 453293 | AA382267 | Hs.10653 | ESTs | 8.4 | 0.09 | upregulate stage |
| 453321 | AI984381 | Hs.232521 | ESTs | 6.7 | 0.1 | upregulate stage |
| 453329 | T97205 | Hs.17998 | ESTs | 8.9 | 0.08 | upregulate stage |
| 453389 | BE273648 | Hs.32963 | cadherin 6, type 2, K-cadherin (fetal ki | 1 | 0.18 | upregulate stage |
| 453437 | H10751 | Hs.79981 | Human clone 23560 mRNA sequence | 1 | 0.83 | upregulate stage |
| 453450 | AW797627 | Hs.89474 | ADP-ribosylation factor 6 | 7.09 | 0.08 | upregulate stage |
| 453459 | BE047032 | Hs.257789 | ESTs | 2.35 | 0.3 | upregulate stage |
| 453476 | AI640500 | Hs.24633 | SAM domain, SH3 domain and nuclear local | 2.75 | 0.16 | upregulate stage |
| 453651 | AA971698 | Hs.159397 | x 010 protein | 8.95 | 0.08 | upregulate stage |
| 453653 | AW505554 | Hs.300284 | ESTs | 4.6 | 0.1 | upregulate stage |
| 453775 | NM_002916 | Hs.35120 | replication factor C (activator 1) 4 (37 | 3.4 | 0.1 | upregulate stage |
| 453776 | R15749 | Hs.31677 | ESTs | 1 | 1 | upregulate stage |
| 453846 | AL157586 | | gb: DKFZp761H0216_r1 761 (synonym: hamy2) | 1 | 0.95 | upregulate stage |
| 453884 | AA355925 | Hs.36232 | KIAA0186 gene product | 10.25 | 0.06 | upregulate stage |
| 453900 | AW003582 | Hs.226414 | ESTs, Weakly similar to ALU8_HUMAN ALU S | 4.75 | 0.12 | upregulate stage |
| 453913 | AW004683 | Hs.233502 | ESTs | 3.65 | 0.14 | upregulate stage |
| 453925 | AW021088 | Hs.181614 | ESTs | 3.7 | 0.13 | upregulate stage |
| 453931 | AL121278 | Hs.25144 | ESTs | 3.45 | 0.18 | upregulate stage |
| 453945 | NM_005171 | Hs.36908 | activating transcription factor 1 | 6.35 | 0.12 | upregulate stage |
| 454032 | W31790 | Hs.194293 | ESTs | 6.15 | 0.07 | upregulate stage |
| 454049 | AW022885 | | gb: df45e05.y1 Morton Fetal Cochlea Homo | 2.8 | 0.15 | upregulate stage |
| 454069 | AW025160 | Hs.34161 | ESTs, Moderately similar to ALU1_HUMAN A | 1 | 0.32 | upregulate stage |
| 454099 | AW062974 | | gb: IL1-ST0041-020899-001-H08 ST0041 Homo | 1 | 1 | upregulate stage |
| 454111 | AW081681 | Hs.269064 | ESTs | 2.8 | 0.18 | upregulate stage |
| 454219 | X75042 | Hs.44313 | v-rel avian reticuloendotheliosis viral | 9.4 | 0.05 | upregulate stage |
| 454259 | AL110136 | Hs.47679 | Homo sapiens mRNA: cDNA DKFZp564I112 (fr | 6.2 | 0.11 | upregulate stage |
| 454327 | BE064097 | | gb: QV3-BT0297-231199-020-h08 BT0297 Homo | 1 | 1 | upregulate stage |
| 454331 | AW372937 | | gb: QV3-BT0381-161299-042-a09 BT0381 Homo | 1 | 0.43 | upregulate stage |
| 454380 | AW858722 | | gb: RC3-CT0347-281199-011-c04 CT0347 Homo | 1 | 0.29 | upregulate stage |
| 454524 | AW857191 | | gb: RC2-CT0304-080100-011-b12 CT0304 Homo | 10.55 | 0.08 | upregulate stage |
| 454592 | AW810112 | | gb: MR4-ST0124-100400-006-e07 ST0124 Homo | 1 | 0.37 | upregulate stage |
| 454648 | AW811960 | | gb: RC2-ST0168-240300-017-f09 ST0168 Homo | 1 | 0.4 | upregulate stage |
| 454687 | AW814473 | | gb: MR3-ST0203-010200-109-c11 ST0203 Homo | 1 | 1 | upregulate stage |
| 454692 | AW813350 | | gb: MR3-ST0192-100100-024-g07 ST0192 Homo | 4.45 | 0.14 | upregulate stage |
| 454702 | BE145915 | | gb: MR0-HT0208-221299-204-h08 HT0208 Homo | 9.65 | 0.08 | upregulate stage |
| 454729 | AW817003 | | gb: QV0-ST0247-040100-081-f03 ST0247 Homo | 1 | 0.8 | upregulate stage |
| 454789 | BE156314 | | gb: QV0-HT0367-150200-114-d02 HT0367 Homo | 1 | 0.31 | upregulate stage |
| 454797 | BE161168 | | gb: PM0-HT0425-170100-002-a10 HT0425 Homo | 4.1 | 0.14 | upregulate stage |
| 454863 | AW835610 | | gb: QV4-LT0016-090200-100-c02 LT0016 Homo | 1 | 1 | upregulate stage |
| 454893 | AW837753 | | gb: CM1-LT0042-310100-112-g03 LT0042 Homo | 4.45 | 0.18 | upregulate stage |
| 454898 | AW838125 | | gb: QV2-LT0051-240300-097-e12 LT0051 Homo | 1 | 1 | upregulate stage |
| 454951 | AW847464 | | gb: RC3-CT0208-270999-021-h12 CT0208 Homo | 7.4 | 0.1 | upregulate stage |
| 454956 | AW847725 | | gb: IL3-CT0213-180200-041-H10 CT0213 Homo | 1 | 0.23 | upregulate stage |
| 455047 | AW852530 | | gb: PM1-CT0243-071099-001-g06 CT0243 Homo | 4.25 | 0.13 | upregulate stage |
| 455128 | AW861555 | | gb: RC2-CT0321-110100-013-b05 CT0321 Homo | 2.9 | 0.13 | upregulate stage |
| 455201 | AW947884 | | gb: PM1-MT0010-200300-001-g08 MT0010 Homo | 3.15 | 0.16 | upregulate stage |
| 455207 | AW994394 | | gb: RC3-BN0036-060400-014-h12 BN0036 Homo | 1 | 0.18 | upregulate stage |
| 455331 | AW897292 | | gb: CM0-NN0057-150400-338-b02 NN0057 Homo | 1 | 0.87 | upregulate stage |
| 455351 | AW901942 | | gb: QV0-NN1022-100400-190-b04 NN1022 Homo | 1 | 0.39 | upregulate stage |
| 455380 | BE160188 | | gb: QV1-HT0413-010200-059-g05 HT0413 Homo | 1.96 | 0.33 | upregulate stage |
| 455414 | AW936969 | | gb: RC1-DT0029-160200-013-f10 DT0029 Homo | 1 | 1 | upregulate stage |
| 455428 | AW938204 | | gb: QV0-DT0048-170200-124-f01 DT0048 Homo | 1 | 0.67 | upregulate stage |
| 455573 | BE004988 | | gb: MR2-BN0114-100500-020-b04 BN0114 Homo | 1 | 1 | upregulate stage |
| 455586 | BE070794 | | gb: RC3-BT0501-130100-011-h02 BT0501 Homo | 1 | 1 | upregulate stage |
| 455595 | BE008343 | | gb: CM0-BN0154-080400-325-g10 BN0154 Homo | 1 | 1 | upregulate stage |
| 455610 | BE011703 | | gb: CM3-BN0223-100500-177-h09 BN0223 Homo | 6.05 | 0.12 | upregulate stage |
| 455647 | BE064415 | | gb: RC4-BT0311-241199-012-b03 BT0311 Homo | 1 | 1 | upregulate stage |
| 455650 | BE064655 | | gb: RC1-BT0313-301299-012-c09 BT0313 Homo | 1 | 0.67 | upregulate stage |
| 455657 | BE065209 | | gb: RC1-BT0314-310300-015-b12 BT0314 Homo | 1.87 | 0.4 | upregulate stage |
| 455669 | BE065803 | | gb: RC2-BT0318-241199-011-g02 BT0318 Homo | 2.85 | 0.2 | upregulate stage |
| 455678 | BE066007 | | gb: RC3-BT0319-120200-014-d09 BT0319 Homo | 2.8 | 0.18 | upregulate stage |
| 455761 | BE080895 | | gb: QV1-BT0631-280200-084-e01 BT0631 Homo | 1 | 0.48 | upregulate stage |
| 455799 | BE169911 | Hs.14570 | Homo sapiens cDNA: FLJ22530 fis, clone H | 5.7 | 0.11 | upregulate stage |
| 455831 | BE144966 | | gb: RC6-HT0187-201099-031-c04 HT0187 Homo | 1 | 1 | upregulate stage |
| 455874 | BE152283 | | gb: QV4-HT0316-191199-039-b01 HT0316 Homo | 1 | 0.67 | upregulate stage |
| 455903 | BE155185 | | gb: PM1-HT0350-231299-005-g05 HT0350 Homo | 1 | 0.31 | upregulate stage |
| 455938 | BE159432 | | gb: MR0-HT0407-140200-009-e06 HT0407 Homo | 2.4 | 0.15 | upregulate stage |
| 455950 | BE161004 | | gb: PM0-HT0425-170100-002-h03 HT0425 Homo | 1 | 0.44 | upregulate stage |
| 455951 | BE161001 | | gb: PM0-HT0425-170100-002-f10 HT0425 Homo | 1 | 0.38 | upregulate stage |
| 455965 | BE167014 | | gb: CM2-HT0502-140200-088-d08 HT0502 Homo | 1 | 1 | upregulate stage |
| 455981 | BE177000 | | gb: RC4-HT0587-070400-015-b07 HT0587 Homo | 1 | 0.57 | upregulate stage |
| 456034 | AW450979 | | gb: UI-H-BI3-ala-a-12-0-UI.s1 NCI_CGAP_Su | 8.29 | 0.05 | upregulate stage |
| 456046 | R51494 | Hs.71818 | ESTs | 3.15 | 0.17 | upregulate stage |
| 456122 | R11813 | | gb: yf53a04.r1 Soares infant brain 1NIB H | 1.3 | 0.31 | upregulate stage |
| 456212 | N51636 | | gb: yy87b01.s1 Soares_multiple_sclerosis_{—} | 4.45 | 0.14 | upregulate stage |
| 456265 | AI968210 | Hs.173623 | ESTs | 1 | 0.34 | upregulate stage |
| 456285 | R67585 | Hs.268748 | ESTs | 1 | 0.83 | upregulate stage |
| 456320 | AI734064 | Hs.136212 | ESTs | 1 | 1 | upregulate stage |
| 456353 | AI042330 | Hs.87128 | ESTs, Weakly similar to similar to YBS4 | 5.15 | 0.11 | upregulate stage |
| 456486 | AA676544 | Hs.171545 | HIV-1 Rev binding protein | 1 | 0.27 | upregulate stage |
| 456493 | AA261830 | | gb: zs17g09.r1 NCI_CGAP_GCB1 Homo sapiens | 1 | 0.8 | upregulate stage |
| 456504 | AK000532 | Hs.98491 | Homo sapiens cDNA FLJ20525 fis, clone KA | 1 | 0.29 | upregulate stage |
| 456508 | AA502764 | Hs.123469 | ESTs, Weakly similar to AF208855 1 BM-01 | 17.7 | 0.05 | upregulate stage |
| 456519 | AA279917 | Hs.88678 | ESTs, Weakly similar to Unknown [H. sapie | 2.3 | 0.18 | upregulate stage |
| 456536 | AW135986 | Hs.257859 | ESTs | 9.45 | 0.06 | upregulate stage |
| 456592 | R91600 | | gb: yq10c02.r1 Soares fetal liver spleen | 4.5 | 0.14 | upregulate stage |
| 456621 | T35958 | Hs.107614 | DKFZP564I1171 protein | 1 | 0.2 | upregulate stage |
| 456682 | AW500321 | Hs.246766 | Homo sapiens cDNA FLJ12360 fis, clone MA | 1 | 0.24 | upregulate stage |
| 456726 | H43102 | Hs.144183 | ESTs | 1 | 0.69 | upregulate stage |
| 456736 | AW248217 | Hs.1619 | achaete-scute complex (Drosophila) homol | 0.89 | 0.91 | upregulate stage |
| 456786 | AK002084 | Hs.132851 | hypothetical protein FLJ11222 | 3.2 | 0.13 | upregulate stage |
| 456800 | AL118754 | | gb: DKFZp761P1910_r1 761 (synonym: hamy2) | 1 | 0.69 | upregulate stage |
| 456823 | AL161979 | Hs.146128 | Homo sapiens mRNA; cDNA DKFZp761G1823 (f | 8.95 | 0.07 | upregulate stage |
| 456844 | AI264155 | Hs.152981 | CDP-diacylglycerol synthase (phosphatida | 5.55 | 0.1 | upregulate stage |
| 456999 | AA319798 | Hs.172247 | eukaryotic translation elongation factor | 11.3 | 0.07 | upregulate stage |
| 457015 | AA688058 | Hs.261544 | ESTs | 9.25 | 0.08 | upregulate stage |
| 457030 | AI301740 | Hs.173381 | dihydropyrimidinase-like 2 | 2.65 | 0.17 | upregulate stage |
| 457158 | AA135370 | Hs.188536 | Homo sapiens cDNA: FLJ21635 fis, clone C | 1 | 1 | upregulate stage |
| 457190 | AI753247 | Hs.29643 | Homo sapiens cDNA FLJ13103 fis, clone NT | 1 | 0.87 | upregulate stage |
| 457309 | AF131843 | Hs.239340 | Homo sapiens clone 24987 mRNA sequence | 2.6 | 0.15 | upregulate stage |
| 457376 | AI026984 | Hs.293662 | ESTs | 1 | 1 | upregulate stage |
| 457402 | AW452648 | Hs.149342 | activation-induced cytidine deaminase | 2.9 | 0.16 | upregulate stage |
| 457435 | AW972024 | Hs.154645 | ESTs, Weakly similar to tyrosine kinase | 1 | 0.36 | upregulate stage |
| 457437 | AW969732 | | gb: EST381810 MAGE resequences, MAGK Homo | 2.5 | 0.14 | upregulate stage |
| 457465 | AW301344 | Hs.195969 | ESTs | 6.3 | 0.1 | upregulate stage |
| 457467 | AW974815 | Hs.292786 | ESTs | 1 | 1 | upregulate stage |
| 457474 | AW972935 | | gb: EST385031 MAGE resequences, MAGM Homo | 1 | 0.29 | upregulate stage |
| 457530 | AW973713 | Hs.293596 | ESTs | 1 | 0.39 | upregulate stage |
| 457637 | AI288373 | Hs.149875 | ESTs | 1 | 1 | upregulate stage |
| 457643 | AI375499 | Hs.27379 | ESTs | 3.25 | 0.19 | upregulate stage |
| 457650 | AA649162 | Hs.236456 | ESTs | 8.9 | 0.08 | upregulate stage |
| 457661 | AA917801 | Hs.128596 | ESTs | 0.96 | 0.9 | upregulate stage |
| 457692 | AA744046 | Hs.133350 | ESTs | 1 | 1 | upregulate stage |
| 457857 | AW814892 | Hs.273104 | ESTs | 1 | 1 | upregulate stage |
| 457892 | AA744389 | | gb: ny51e10.s1 NCI_CGAP_Pr18 Homo sapiens | 8.7 | 0.06 | upregulate stage |
| 457902 | AI624876 | Hs.75862 | MAD (mothers against decapentaplegic, Dr | 2.2 | 0.21 | upregulate stage |
| 457943 | AA765625 | Hs.155690 | ESTs | 3.55 | 0.1 | upregulate stage |
| 457948 | AI498640 | Hs.159354 | ESTs | 2.65 | 0.19 | upregulate stage |
| 457964 | NM_016353 | Hs.5943 | rec | 1.5 | 0.17 | upregulate stage |
| 458004 | AW976942 | Hs.153057 | ESTs | 1 | 0.87 | upregulate stage |
| 458027 | L49054 | Hs.85195 | ESTs, Highly similar to t(3; 5)(q25.1; p34 | 3.45 | 0.12 | upregulate stage |
| 458079 | AI796870 | Hs.54277 | ESTs | 11.5 | 0.05 | upregulate stage |
| 458158 | AW296778 | Hs.300357 | ESTs, Highly similar to dJ416F21.2 [H. sa | 1 | 1 | upregulate stage |
| 458171 | AI420016 | Hs.192090 | ESTs | 0.69 | 1.09 | upregulate stage |
| 458172 | BE007237 | | gb: PM0-BN0139-050500-003-g09 BN0139 Homo | 3 | 0.16 | upregulate stage |
| 458186 | AA904244 | Hs.153205 | ESTs | 4.6 | 0.15 | upregulate stage |
| 458242 | BE299588 | Hs.28465 | Homo sapiens cDNA: FLJ21869 fis, clone H | 3.1 | 0.16 | upregulate stage |
| 458270 | T66139 | Hs.113631 | ESTs | 1 | 0.67 | upregulate stage |
| 458282 | AA984075 | Hs.22580 | alkylglycerone phosphate synthase | 1 | 1 | upregulate stage |
| 458287 | AA987556 | Hs.12867 | ESTs | 5.05 | 0.13 | upregulate stage |
| 458580 | Z30118 | Hs.293788 | ESTs, Moderately similar to unnamed prot | 1 | 0.28 | upregulate stage |
| 458586 | AI683479 | Hs.65390 | ESTs | 8.2 | 0.07 | upregulate stage |
| 458608 | AW444662 | Hs.202247 | ESTs | 1 | 0.27 | upregulate stage |
| 458632 | AI744445 | Hs.24650 | Homo sapiens cDNA FLJ13047 fis, clone NT | 1.05 | 0.23 | upregulate stage |
| 458663 | AV658444 | Hs.280776 | Homo sapiens cDNA FLJ13684 fis, clone PL | 5.05 | 0.13 | upregulate stage |
| 458670 | AI301987 | Hs.233398 | ESTs | 8.9 | 0.08 | upregulate stage |
| 458680 | N73773 | Hs.282950 | ESTs | 1 | 0.23 | upregulate stage |
| 458720 | AV662037 | Hs.124740 | ESTs | 1 | 0.3 | upregulate stage |
| 458722 | AA741545 | Hs.282832 | ESTs | 3.2 | 0.11 | upregulate stage |
| 458747 | BE618395 | Hs.257391 | ESTs, Weakly similar to GTPase-activatin | 3.3 | 0.14 | upregulate stage |
| 458760 | AI498631 | Hs.111334 | ferritin, light polypeptide | 11 | 0.07 | upregulate stage |
| 458781 | AI444821 | | gb: RET4B7 sabtracted retina cDNA library | 6.05 | 0.12 | upregulate stage |
| 458801 | N98648 | Hs.276860 | ESTs | 4.45 | 0.13 | upregulate stage |
| 458880 | AA046742 | | gb: zf48c09.r1 Soares retina N2b4HR Homo | 9 | 0.08 | upregulate stage |
| 458886 | AI247487 | Hs.103277 | ESTs | 1 | 0.3 | upregulate stage |
| 458946 | AA009716 | Hs.42311 | ESTs | 8.7 | 0.08 | upregulate stage |
| 459023 | AW968226 | Hs.60798 | ESTs | 2.95 | 0.15 | upregulate stage |
| 459028 | AI940577 | | gb: IL5-HT0009-120799-001-G07 HT0009 Homo | 2.6 | 0.17 | upregulate stage |
| 459030 | H86658 | Hs.107699 | ESTs, Weakly similar to hypothetical pro | 1 | 1 | upregulate stage |
| 459058 | H85939 | Hs.209605 | ESTs | 1 | 1 | upregulate stage |
| 459128 | AI902169 | | gb: IL-BT002-221198-051 B1002 Homo sapien | 1 | 0.26 | upregulate stage |
| 459182 | BE178517 | | gb: PM1-HT0603-090300-001-e09 HT0603 Homo | 1 | 1 | upregulate stage |
| 459204 | AW194601 | Hs.13219 | ESTs | 2.85 | 0.16 | upregulate stage |
| 459256 | AW967468 | Hs.99821 | Homo sapiens mRNA; cDNA DKFZp564C046 (fr | 10.65 | 0.07 | upregulate stage |
| 459319 | NM_000059 | | gb: Homo sapiens breast cancer 2, early o | 1 | 1 | upregulate stage |
| 459395 | Z30300 | Hs.281935 | ESTs | 4.05 | 0.14 | upregulate stage |
| 459459 | AA460445 | | gb: zx66h11. r1 Soares_total_fetes_Nb2HF8_{—} | 4.8 | 0.13 | upregulate stage |
| 459464 | AA854847 | | gb: aj77h02.s1 Soares_parathyroid_tumor_N | 1 | 0.38 | upregulate stage |
| 459492 | AL118619 | | gb: DKFZp761E2410_r1 761 (synonym: hamy2) | 1 | 1 | upregulate stage |
| 459530 | AW770811 | | gb: hn49d07.x1 NCI_CGAP_Co17 Homo sapiens | 1 | 1 | upregulate stage |
| 401519 | | | | 12.65 | 0.06 | upregulate stage |
| 402474 | | | | 25.55 | 0.03 | upregulate stage |
| 402727 | | | | 16.25 | 0.05 | upregulate stage |
| 405411 | | | | 12.95 | 0.05 | upregulate stage |
| 406636 | L12064 | | gb: Homo sapiens (clone WR4.12VL) anti-th | 14.42 | 0.03 | upregulate stage |
| 406685 | M18728 | | gb: Human nonspecific crossreacting antig | 15.75 | 0.03 | upregulate stage |
| 407151 | H25836 | Hs.301527 | ESTs, Moderately similar to unknown [H.s | 16.3 | 0.04 | upregulate stage |
| 407242 | M18728 | | gb: Human nonspecific crossreacting antig | 12.56 | 0.03 | upregulate stage |
| 407347 | AA829847 | Hs.167347 | ESTs, Weakly similar to ALU8_HUMAN ALU S | 12.91 | 0.06 | upregulate stage |
| 407796 | AA195509 | Hs.272239 | lymphocyte activation-associated protein | 14.2 | 0.06 | upregulate stage |
| 408243 | Y00787 | Hs.624 | interleukin 8 | 18.52 | 0.02 | upregulate stage |
| 408380 | AF123050 | Hs.44532 | diubiquitin | 16 | 0.03 | upregulate stage |
| 408618 | AK000637 | Hs.46624 | HSPC043 protein | 12.6 | 0.06 | upregulate stage |
| 408741 | M73720 | Hs.646 | carboxypeptidase A3 (mast cell) | 15.5 | 0.03 | upregulate stage |
| 409417 | AA156247 | Hs.295908 | ESTs, Weakly similar to ALU7_HUMAN ALU S | 12.55 | 0.04 | upregulate stage |
| 410315 | AI638871 | Hs.17625 | ESTs | 14 | 0.05 | upregulate stage |
| 410324 | AW292539 | Hs.30177 | ESTs | 15.65 | 0.05 | upregulate stage |
| 412420 | AL035668 | Hs.73853 | bone morphogenetic protein 2 | 12.6 | 0.05 | upregulate stage |
| 412490 | AW803564 | Hs.288850 | Homo sapiens cDNA: FLJ22528 fis, clone H | 16.45 | 0.03 | upregulate stage |
| 413281 | AA861271 | Hs.34396 | ESTs | 12.95 | 0.04 | upregulate stage |
| 414004 | AA737033 | Hs.7155 | ESTs, Weakly similar to 2115357A TYKi pr | 15.25 | 0.04 | upregulate stage |
| 414161 | AA136106 | Hs.184852 | KIAA1553 protein | 13.25 | 0.06 | upregulate stage |
| 414217 | AI309298 | Hs.279898 | Homo sapiens cDNA: FLJ23165 fis, clone L | 12.5 | 0.05 | upregulate stage |
| 414219 | W20010 | Hs.75823 | ALL1-fused gene from chromosome 1q | 12.71 | 0.05 | upregulate stage |
| 414493 | AL133921 | Hs.76272 | retinoblastoma-binding protein 2 | 13.05 | 0.05 | upregulate stage |
| 414522 | AW518944 | Hs.76325 | Homo sapiens cDNA: FLJ23125 fis, clone L | 30.45 | 0.02 | upregulate stage |
| 414602 | AW630088 | Hs.76550 | Homo sapiens mRNA; cDNA DKFZp564B1264 (f | 29 | 0.02 | upregulate stage |
| 414761 | AU077228 | Hs.77256 | enhancer of zeste (Drosophila) homolog 2 | 13.2 | 0.05 | upregulate stage |
| 416114 | AI695549 | Hs.183868 | glucuronidase, beta | 14.7 | 0.04 | upregulate stage |
| 416179 | R19015 | Hs.79067 | MAD (mothers against decapentaplegic, Dr | 13 | 0.06 | upregulate stage |
| 416391 | AI878927 | Hs.79284 | mesoderm specific transcript (mouse) hom | 13.3 | 0.04 | upregulate stage |
| 416815 | U41514 | Hs.80120 | UDP-N-acetyl-alpha-D-galactosamine: polyp | 15.55 | 0.04 | upregulate stage |
| 416980 | AA381133 | Hs.80684 | high-mobility group (nonhistone chromoso | 23.85 | 0.03 | upregulate stage |
| 417258 | N58885 | Hs.294040 | ESTs | 15.05 | 0.06 | upregulate stage |
| 417274 | N92036 | Hs.81848 | RAD21 (S. pombe) homolog | 23.05 | 0.04 | upregulate stage |
| 417353 | AA375752 | Hs.76362 | general transcription factor IIA, 2 (12 k | 13 | 0.06 | upregulate stage |
| 417615 | BE548641 | Hs.82314 | hypoxanthine phosphoribosyltransferase 1 | 19.45 | 0.04 | upregulate stage |
| 417696 | BE241624 | Hs.82401 | CD69 antigen (p60, early T-cell activati | 12.45 | 0.03 | upregulate stage |
| 417777 | AI823763 | Hs.7055 | ESTs | 12.6 | 0.06 | upregulate stage |
| 417821 | BE245149 | Hs.82643 | protein tyrosine kinase 9 | 20.8 | 0.04 | upregulate stage |
| 417928 | AA209344 | Hs.282973 | ESTs | 14.65 | 0.05 | upregulate stage |
| 418699 | BE539639 | Hs.173030 | ESTs, Weakly similar to ALU8_HUMAN ALU S | 13 | 0.05 | upregulate stage |
| 418791 | AA935633 | Hs.194628 | ESTs | 12.95 | 0.06 | upregulate stage |
| 419145 | N99638 | | gb: za39g11.r1 Soares fetal liver spleen | 13.2 | 0.05 | upregulate stage |
| 421878 | AA299652 | Hs.111496 | Homo sapiens cDNA FLJ11643 fis, clone HE | 12.6 | 0.05 | upregulate stage |
| 422150 | AI867118 | Hs.2953 | ribosomal protein S15a | 13.55 | 0.05 | upregulate stage |
| 422363 | T55979 | Hs.115474 | replication factor C (activator 1) 3 (38 | 15.7 | 0.05 | upregulate stage |
| 424673 | AA345051 | Hs.294092 | ESTs | 16.9 | 0.04 | upregulate stage |
| 424848 | AI263231 | Hs.145607 | ESTs | 15.2 | 0.05 | upregulate stage |
| 424865 | AF011333 | Hs.153563 | lymphocyte antigen 75 | 12.85 | 0.04 | upregulate stage |
| 425053 | AF046024 | Hs.154320 | ubiquitin-activating enzyme E1C (homolog | 13.25 | 0.06 | upregulate stage |
| 425787 | AA363867 | Hs.155029 | ESTs | 17.55 | 0.05 | upregulate stage |
| 426252 | BE176980 | Hs.28917 | ESTs | 12.95 | 0,05 | upregulate stage |
| 426329 | AL389951 | Hs.271623 | nucleoporin 50 kD | 13.8 | 0.05 | upregulate stage |
| 427127 | AW802282 | Hs.22265 | pyruvate dehydrogenase phosphatase | 13.85 | 0.05 | upregulate stage |
| 427351 | AW402593 | Hs.123253 | Homo sapiens cDNA: FLJ22009 fis, clone H | 12.8 | 0.06 | upregulate stage |
| 427979 | BE379776 | Hs.181309 | proteasome (prosome, macropain) subunit, | 16.95 | 0.05 | upregulate stage |
| 428044 | AA093322 | Hs.182225 | RNA binding motif protein 3 | 14.65 | 0.05 | upregulate stage |
| 428428 | AL037544 | Hs.184298 | cyclin-dependent kinase 7 (homolog of Xe | 17.15 | 0.05 | upregulate stage |
| 428840 | M15990 | Hs.194148 | v-yes-1 Yamaguchi sarcoma viral oncogene | 16.8 | 0.05 | upregulate stage |
| 430191 | AI149880 | Hs.188809 | ESTs | 14.5 | 0.05 | upregulate stage |
| 430589 | AJ002744 | Hs.246315 | UDP-N-acetyl-alpha-D-galactosamine: polyp | 14.9 | 0.05 | upregulate stage |
| 430853 | AI734179 | Hs.105676 | ESTs | 13.55 | 0.06 | upregulate stage |
| 431049 | AA846576 | Hs.103267 | hypothetical protein FLJ22548 similar to | 16.2 | 0.04 | upregulate stage |
| 431211 | M86849 | Hs.5566 | gap junction protein, beta 2, 26 kD (conn | 27 | 0.01 | upregulate stage |
| 431341 | AA307211 | Hs.251531 | proteasome (prosome, macropain) subunit, | 13.45 | 0.06 | upregulate stage |
| 431639 | AK000680 | Hs.266175 | phosphoprotein associated with GEMs | 21.2 | 0.03 | upregulate stage |
| 431770 | BE221880 | Hs.268555 | 5′-3′ exoribonuclease 2 | 13.05 | 0.06 | upregulate stage |
| 431863 | AA188185 | Hs.271871 | spindlin | 15.6 | 0.05 | upregulate stage |
| 434263 | N34895 | Hs.44648 | ESTs | 14.25 | 0.05 | upregulate stage |
| 434651 | BE616902 | Hs.285313 | core promoter element binding protein | 17.95 | 0.05 | upregulate stage |
| 436286 | AA804442 | Hs.3459 | Homo sapiens cDNA: FLJ22003 fis, clone H | 14.95 | 0.05 | upregulate stage |
| 436385 | BE551618 | Hs.144097 | ESTs | 13.85 | 0.06 | upregulate stage |
| 437192 | AW975786 | Hs.75355 | ubiquitin-conjugating enzyme E2N (homolo | 12.75 | 0.06 | upregulate stage |
| 438000 | AI825880 | Hs.5985 | non-kinase Cdc42 effector protein SPEC2 | 15.3 | 0.04 | upregulate stage |
| 439941 | AI392640 | Hs.18272 | ESTs | 17.42 | 0.05 | upregulate stage |
| 440086 | NM_005402 | Hs.288757 | v-ral simian leukemia viral oncogene hom | 12.59 | 0.05 | upregulate stage |
| 440116 | AI798851 | Hs.9403 | ESTs | 14.5 | 0.05 | upregulate stage |
| 441020 | W79283 | Hs.35962 | ESTs | 12.4 | 0.04 | upregulate stage |
| 441633 | AW958544 | Hs.112242 | ESTs | 15.85 | 0.03 | upregulate stage |
| 441980 | AK001441 | Hs.8055 | hypothetical protein FLJ10579 | 13.6 | 0.05 | upregulate stage |
| 442043 | BE567620 | Hs.99210 | ESTs | 12.5 | 0.06 | upregulate stage |
| 442053 | R35343 | Hs.24968 | Human DNA sequence from clone RP1-233G16 | 12.65 | 0.06 | upregulate stage |
| 442271 | AF000652 | Hs.8180 | syndecan binding protein (syntenin) | 15.15 | 0.05 | upregulate stage |
| 443303 | U67319 | Hs.9216 | caspase 7, apoptosis-related cysteine pr | 13.4 | 0.05 | upregulate stage |
| 445033 | AV652402 | Hs.155145 | ESTs | 13.3 | 0.05 | upregulate stage |
| 446619 | AU076643 | Hs.313 | secreted phosphoprotein 1 (osteopontin, | 30.5 | 0.02 | upregulate stage |
| 446847 | T51454 | Hs.82845 | Human clone 23815 mRNA sequence | 13.8 | 0.04 | upregulate stage |
| 446921 | AB012113 | Hs.16530 | small inducible cytokine subfamily A (Cy | 15.15 | 0.04 | upregulate stage |
| 448712 | W01046 | Hs.181634 | Homo sapiens cDNA: FLJ23602 fis, clone L | 13.2 | 0.05 | upregulate stage |
| 448772 | AW390822 | Hs.24639 | ESTs | 12.75 | 0.06 | upregulate stage |
| 448926 | AI798164 | Hs.140903 | ESTs, Moderately similar to neuronal thr | 13.35 | 0.06 | upregulate stage |
| 449962 | AA004879 | No.187820 | ESTs | 12.79 | 0.05 | upregulate stage |
| 450139 | AK001838 | Hs.296323 | Homo sapiens cDNA FLJ10976 fis, clone PL | 14.76 | 0.06 | upregulate stage |
| 451035 | AU076785 | Hs.430 | plastin 1 (I isoform) | 17.65 | 0.04 | upregulate stage |
| 451334 | AI122691 | Hs.13268 | ESTs | 14.7 | 0.05 | upregulate stage |
| 452567 | D87120 | Hs.29882 | predicted osteoblast protein | 12.45 | 0.06 | upregulate stage |
| 453258 | AW293134 | Hs.32597 | ring finger protein (C3H2C3 type) 6 | 13.4 | 0.05 | upregulate stage |
| 453331 | AI240665 | Hs.8895 | ESTs | 12.6 | 0.05 | upregulate stage |
| 400365 | Y10259 | Hs.274501 | H. sapiens ACTH receptor mRNA 3′UTR | 2.2 | 0.17 | upregulate stage |
| 401256 | | | | 2 | 0.16 | upregulate stage |
| 402075 | | | | 1 | 0.1 | upregulate stage |
| 403029 | | | | 1.75 | 0.16 | upregulate stage |
| 403047 | | | | 3.3 | 0.1 | upregulate stage |
| 403426 | | | | 1.7 | 0.18 | upregulate stage |
| 403754 | | | | 2.8 | 0.12 | upregulate stage |
| 403822 | | | | 1.2 | 0.14 | upregulate stage |
| 407835 | AK002081 | Hs.40337 | hypothetical protein | 1.9 | 0.15 | upregulate stage |
| 407980 | AA046309 | | gb: zf12f01.s1 Soares_fetal_heart_NbHH19W | 1.35 | 0.1 | upregulate stage |
| 408081 | AW451597 | Hs.167409 | ESTs | 2.3 | 0.18 | upregulate stage |
| 408408 | AF070571 | Hs.44690 | Homo sapiens clone 24739 mRNA sequence | 1.65 | 0.12 | upregulate stage |
| 408920 | AL120071 | Hs.48998 | fibronectin leucine rich transmembrane p | 1 | 0.2 | upregulate stage |
| 409810 | AW500895 | | gb: UI-HF-BP0p-air-a-02-0-UI.r1 NIH_MGC_5 | 2.25 | 0.2 | upregulate stage |
| 410094 | BE147897 | Hs.58593 | general transcription factor IIF, polype | 4.05 | 0.12 | upregulate stage |
| 410603 | AA086219 | Hs.68714 | ESTs | 1.9 | 0.18 | upregulate stage |
| 410763 | AF279145 | Hs.8966 | tumor endothelial marker 8 | 4.15 | 0.13 | upregulate stage |
| 411418 | BE241870 | | gb: TCAAP2E0047 Pediatric acute myelogeno | 1.6 | 0.22 | upregulate stage |
| 411691 | AW857199 | | gb: RC2-CT0304-080100-011-f06 CT0304 Homo | 1.45 | 0.24 | upregulate stage |
| 411750 | BE562298 | Hs.71827 | KIAA0112 protein; homolog of yeast ribos | 2.2 | 0.2 | upregulate stage |
| 411880 | AW872477 | | gb: hm30f03.x1 NCI_CGAP_Thy4 Homo sapiens | 1.75 | 0.06 | upregulate stage |
| 412102 | H56435 | Hs.75935 | KIAA0077 protein | 1.7 | 0.2 | upregulate stage |
| 412303 | AW936336 | | gb: QV4-DT0021-281299-070-g11 DT0021 Homo | 1 | 0.17 | upregulate stage |
| 412312 | AW936686 | | gb: PM2-DT0023-080300-004-g01 DT0023 Homo | 3.4 | 0.16 | upregulate stage |
| 412598 | AI681997 | Hs.107057 | ESTs | 2.25 | 0.2 | upregulate stage |
| 413383 | AI128978 | Hs.154706 | Homo sapiens cDNA FLJ13594 fis, clone PL | 2.3 | 0.17 | upregulate stage |
| 413406 | AW452823 | Hs.135268 | ESTs | 3.52 | 0.14 | upregulate stage |
| 413618 | BE154078 | | gb: PM0-HT0339-200400-010-F04 HT0339 Homo | 1 | 0.18 | upregulate stage |
| 416661 | AA634543 | Hs.79440 | IGF-II mRNA-binding protein 3 | 1.05 | 0.12 | upregulate stage |
| 417708 | N74392 | Hs.50495 | ESTs | 2 | 0.16 | upregulate stage |
| 417974 | AA210765 | | gb: zr50c06.r1 NCI_CGAP_GCB1 Homo sapiens | 1.7 | 0.18 | upregulate stage |
| 418604 | AA225632 | Hs.190016 | ESTs | 3.75 | 0.13 | upregulate stage |
| 418631 | AA225921 | Hs.115105 | ESTs | 1.75 | 0.2 | upregulate stage |
| 418830 | BE513731 | Hs.88959 | Human DNA sequence from clone 967N21 on | 3.8 | 0.09 | upregulate stage |
| 418893 | N32264 | Hs.44330 | ESTs | 2.35 | 0.14 | upregulate stage |
| 418950 | T78517 | Hs.13941 | ESTs | 2.15 | 0.19 | upregulate stage |
| 419044 | AI799135 | Hs.87164 | Homo sapiens cDNA FLJ14001 fis, clone Y7 | 1.85 | 0.15 | upregulate stage |
| 420082 | N43741 | Hs.203148 | ESTs | 3.8 | 0.14 | upregulate stage |
| 420653 | AI224532 | Hs.88550 | ESTs | 2.05 | 0.16 | upregulate stage |
| 421112 | AW243875 | Hs.265427 | ESTs | 3.3 | 0.13 | upregulate stage |
| 421683 | AI147535 | Hs.143769 | ESTs | 2 | 0.14 | upregulate stage |
| 421799 | AW972292 | Hs.292998 | ESTs | 2.35 | 0.15 | upregulate stage |
| 422177 | AA720878 | Hs.201375 | ESTs | 3.3 | 0.14 | upregulate stage |
| 422429 | AA310527 | | gb: EST181333 Jurkat T-cells V Home sapie | 3.45 | 0.12 | upregulate stage |
| 422956 | BE545072 | Hs.122579 | hypothetical protein FLJ10461 | 2.15 | 0.11 | upregulate stage |
| 424026 | AI798295 | Hs.123218 | ESTs | 3.8 | 0.14 | upregulate stage |
| 425650 | NM_001944 | Hs.1925 | desmoglein 3 (pemphigus vulgaris antigen | 1 | 0.09 | upregulate stage |
| 425761 | AW664214 | Hs.196729 | ESTs | 2 | 0.19 | upregulate stage |
| 426427 | M86699 | Hs.169840 | TTK protein kinase | 2.1 | 0.16 | upregulate stage |
| 427558 | D49493 | Hs.2171 | growth differentiation factor 10 | 2.15 | 0.14 | upregulate stage |
| 427635 | BE397988 | Hs.179982 | tumor protein p53-binding protein | 3.9 | 0.11 | upregulate stage |
| 428766 | AA477989 | Hs.98800 | ESTs | 3.8 | 0.12 | upregulate stage |
| 429761 | AI276780 | Hs.135173 | ESTs | 1.9 | 0.17 | upregulate stage |
| 430132 | AA204686 | Hs.234149 | hypothetical protein FLJ20647 | 5.05 | 0.11 | upregulate stage |
| 430253 | AK001514 | Hs.236844 | hypothetical protein FLJ10652 | 3.55 | 0.15 | upregulate stage |
| 430388 | AA356923 | Hs.240770 | nuclear cap binding protein subunit 2, 2 | 2.5 | 0.14 | upregulate stage |
| 431187 | AW971146 | Hs.293187 | ESTs | 3.95 | 0.13 | upregulate stage |
| 431364 | AW971382 | Hs.294016 | ESTs, Weakly similar to alpha-1 (XVIII) c | 1.8 | 0.15 | upregulate stage |
| 431401 | AA504626 | Hs.105735 | ESTs | 1.65 | 0.22 | upregulate stage |
| 431419 | AL041844 | Hs.277522 | ESTs, Weakly similar to FYVE finger-cont | 1.45 | 0.16 | upregulate stage |
| 432361 | AI378562 | Hs.159585 | ESTs | 2.15 | 0.14 | upregulate stage |
| 432810 | AA863400 | Hs.23054 | ESTs | 3.7 | 0.08 | upregulate stage |
| 432926 | AA570416 | Hs.32271 | hypothetical protein FLJ10846 | 2 | 0.2 | upregulate stage |
| 433108 | AB002446 | | gb: Homo sapiens mRNA from chromosome 5q2 | 2.35 | 0.14 | upregulate stage |
| 434153 | AF118072 | Hs.283916 | Homo sapiens PRO1716 mRNA, complete cds | 1 | 0.14 | upregulate stage |
| 435202 | AI971313 | Hs.170204 | KIAA0551 protein | 1.25 | 0.16 | upregulate stage |
| 435313 | AI769400 | Hs.189729 | ESTs | 2 | 0.18 | upregulate stage |
| 435359 | T60843 | Hs.189679 | ESTs | 3.6 | 0.11 | upregulate stage |
| 435488 | H57954 | Hs.34394 | ESTs | 2.2 | 0.22 | upregulate stage |
| 436583 | AW293909 | Hs.156935 | ESTs | 1.4 | 0.19 | upregulate stage |
| 436862 | AI821940 | Hs.264622 | ESTs, Moderately similar to ALU8_HUMAN A | 3.2 | 0.12 | upregulate stage |
| 437485 | AI149570 | Hs.127363 | ESTs | 2.05 | 0.22 | upregulate stage |
| 437854 | AL119723 | | gb: DKFZp761A2124_r1 761 (synonym: hamy2) | 2.75 | 0.15 | upregulate stage |
| 438316 | AA789249 | | gb: aj27g08.s1 Soares_testis_NHT Homo sap | 2.45 | 0.13 | upregulate stage |
| 438390 | AI422017 | | gb: tt45f12.x1 NCI_CGAP_Brn23 Homo sapien | 3.1 | 0.13 | upregulate stage |
| 438915 | AA280174 | Hs.23282 | ESTs | 1.35 | 0.12 | upregulate stage |
| 439983 | AA858394 | Hs.117955 | ESTs | 4 | 0.13 | upregulate stage |
| 442048 | AA974603 | | gb: op34f05.s1 Soares_NFL_T_GBC_S1 Homo s | 5.55 | 0.09 | upregulate stage |
| 442369 | AI565071 | Hs.159983 | ESTs | 3.85 | 0.14 | upregulate stage |
| 442748 | AI016713 | Hs.135787 | ESTs | 2.35 | 0.23 | upregulate stage |
| 443717 | BE163884 | Hs.282331 | ESTs | 2.5 | 0.18 | upregulate stage |
| 445935 | AA287537 | Hs.167585 | ESTs | 1 | 0.2 | upregulate stage |
| 446078 | AI339982 | Hs.156061 | ESTs | 2.25 | 0.24 | upregulate stage |
| 446139 | H77395 | Hs.39749 | ESTs | 2.15 | 0.18 | upregulate stage |
| 446183 | AA354991 | Hs.14222 | Homo sapiens mRNA; cDNA DKFZp761P019 (fr | 3.45 | 0.14 | upregulate stage |
| 448253 | H25899 | Hs.201591 | ESTs | 1.65 | 0.18 | upregulate stage |
| 448956 | AK001674 | Hs.22630 | cofactor required for Sp1 transcriptiona | 2.2 | 0.14 | upregulate stage |
| 449199 | AI990122 | Hs.196988 | ESTs | 1.25 | 0.23 | upregulate stage |
| 449558 | AA001765 | Hs.157079 | KIAA1227 protein | 1 | 0.16 | upregulate stage |
| 449576 | AW014631 | Hs.225068 | ESTs | 2.3 | 0.19 | upregulate stage |
| 449859 | T98077 | Hs.18214 | ESTs | 6.3 | 0.07 | upregulate stage |
| 450434 | AA166950 | Hs.18645 | ESTs, Weakly similar to partial CDS [C.e | 1.65 | 0.22 | upregulate stage |
| 450625 | AW970107 | | gb: EST382188 MAGE resequences, MAGK Homo | 1.35 | 0.19 | upregulate stage |
| 451337 | AI400209 | Hs.60787 | ESTs | 1.6 | 0.16 | upregulate stage |
| 451686 | AA059246 | Hs.110293 | ESTs | 3.4 | 0.14 | upregulate stage |
| 452079 | AA830908 | Hs.15825 | ESTs | 1.9 | 0.23 | upregulate stage |
| 452220 | BE158006 | Hs.212296 | ESTs | 3.1 | 0.17 | upregulate stage |
| 453918 | AW005123 | Hs.231975 | ESTs | 1 | 0.21 | upregulate stage |
| 455350 | AW901809 | | gb: QV0-NN1020-170400-195-h02 NN1020 Homo | 2 | 0.2 | upregulate stage |
| 456511 | AA282330 | Hs.145668 | ESTs | 1.15 | 0.12 | upregulate stage |
| 456986 | D38299 | Hs.170917 | prostaglandin E receptor 3 (subtype EP3) | 1.65 | 0.18 | upregulate stage |
| 457427 | AW971287 | | gb: EST383376 MAGE resequences, MAGL Homo | 2.35 | 0.16 | upregulate stage |
| 400296 | AA305627 | Hs.139336 | ATP-binding cassette, sub-family C (CFTR | 1 | 0.27 | upregulate stage |
| 400409 | AF153341 | Hs.283954 | Homo sapiens winged helix/forkhead trans | 2.33 | 0.2 | upregulate stage |
| 400471 | | | | 7.45 | 0.09 | upregulate stage |
| 400641 | | | | 0.71 | 0.31 | upregulate stage |
| 400749 | | | | 7.25 | 0.1 | upregulate stage |
| 400751 | | | | 5.35 | 0.09 | upregulate stage |
| 400761 | | | | 5.9 | 0.1 | upregulate stage |
| 400843 | | | | 5.85 | 0.07 | upregulate stage |
| 401045 | | | | 2.42 | 0.17 | upregulate stage |
| 401049 | | | | 1.2 | 0.19 | upregulate stage |
| 401192 | | | | 2.47 | 0.3 | upregulate stage |
| 401203 | | | | 6.73 | 0.08 | upregulate stage |
| 401205 | | | | 6.63 | 0.1 | upregulate stage |
| 401276 | | | | 6.95 | 0.1 | upregulate stage |
| 401561 | | | | 2.2 | 0.13 | upregulate stage |
| 401604 | | | | 1 | 0.19 | upregulate stage |
| 402245 | | | | 7.65 | 0.09 | upregulate stage |
| 402296 | | | | 1 | 0.33 | upregulate stage |
| 402530 | | | | 5.1 | 0.13 | upregulate stage |
| 402812 | | | | 1.65 | 0.17 | upregulate stage |
| 402820 | | | | 1 | 0.34 | upregulate stage |
| 402892 | | | | 1 | 1 | upregulate stage |
| 403344 | | | | 6.5 | 0.08 | upregulate stage |
| 404156 | | | | 3.7 | 0.11 | upregulate stage |
| 404290 | | | | 4.45 | 0.09 | upregulate stage |
| 404538 | | | | 8.38 | 0.09 | upregulate stage |
| 404676 | | | | 8.3 | 0.09 | upregulate stage |
| 404977 | | | | 0.9 | 0.35 | upregulate stage |
| 405033 | | | | 1.52 | 0.31 | upregulate stage |
| 405109 | N47812 | Hs.81360 | CGI-35 protein | 6.2 | 0.1 | upregulate stage |
| 405654 | | | | 1.95 | 0.06 | upregulate stage |
| 406081 | | | | 3 | 0.07 | upregulate stage |
| 406270 | | | | 6.09 | 0.13 | upregulate stage |
| 406399 | | | | 1.55 | 0.41 | upregulate stage |
| 406475 | | | | 6.2 | 0.12 | upregulate stage |
| 406485 | | | | 1 | 0.48 | upregulate stage |
| 406741 | AA058357 | Hs.74466 | carcinoembryonic antigen-related cell ad | 5.4 | 0.07 | upregulate stage |
| 406867 | AA157857 | Hs.182265 | keratin 19 | 2.26 | 0.37 | upregulate stage |
| 407173 | T64349 | | gb: yc10d08.s1 Stratagene lung (937210) H | 3.35 | 0.11 | upregulate stage |
| 407230 | AA157857 | Hs.182265 | keratin 19 | 2.15 | 0.38 | upregulate stage |
| 407266 | AJ235664 | | gb: Homo sapiens mRNA for immunoglobulin | 2.1 | 0.09 | upregulate stage |
| 407783 | AW996872 | Hs.172028 | a disintegrin and metalloproteinase doma | 3.25 | 0.11 | upregulate stage |
| 407825 | NM_006152 | Hs.40202 | lymphoid-restricted membrane protein | 6.25 | 0.08 | upregulate stage |
| 407870 | AB032990 | Hs.40719 | hypothetical protein KIAA1164 | 4.5 | 0.12 | upregulate stage |
| 407877 | AW016811 | Hs.234478 | Homo sapiens cDNA: FLJ22648 fis, clone H | 3.3 | 0.15 | upregulate stage |
| 407968 | NM_004863 | Hs.59403 | serine palmitoyltransferase, long chain | 7.35 | 0.1 | upregulate stage |
| 408162 | AA993833 | Hs.118527 | ESTs | 6.2 | 0.09 | upregulate stage |
| 408363 | NM_003389 | Hs.44396 | coronin, actin-binding protein, 2A | 5.36 | 0.14 | upregulate stage |
| 408576 | NM_003542 | Hs.46423 | H4 histone family, member G | 7.28 | 0.1 | upregulate stage |
| 408673 | BE208517 | Hs.184109 | ribosomal protein L37a | 2.53 | 0.24 | upregulate stage |
| 408684 | R61377 | Hs.12727 | hypothetical protein FLJ21610 | 1 | 0.3 | upregulate stage |
| 409361 | NM_005982 | Hs.54416 | sine oculis homeobox (Drosophila) homolo | 7.7 | 0.06 | upregulate stage |
| 409592 | BE280951 | Hs.55058 | EH-domain containing 4 | 3.95 | 0.1 | upregulate stage |
| 409744 | AW675258 | Hs.56265 | Homo sapiens mRNA; cDNA DKFZp586P2321 (f | 1.55 | 0.16 | upregulate stage |
| 410141 | R07775 | Hs.287657 | Homo sapiens cDNA: FLJ21291 fis, clone C | 4.1 | 0.18 | upregulate stage |
| 410232 | AW372451 | Hs.61184 | CGI-79 protein | 3.65 | 0.14 | upregulate stage |
| 410269 | AW613597 | | gb: hh79g12.x1 NCI_CGAP_GU1 Homo sapiens | 7.55 | 0.09 | upregulate stage |
| 410297 | AA148710 | Hs.159441 | ESTs | 3.8 | 0.1 | upregulate stage |
| 410337 | M83822 | Hs.62354 | cell division cycle 4-like | 4.35 | 0.19 | upregulate stage |
| 410418 | D31382 | Hs.63325 | transmembrane protease, serine 4 | 1.42 | 0.4 | upregulate stage |
| 410541 | AA065003 | Hs.64179 | hypothetical protein | 1.61 | 0.48 | upregulate stage |
| 410724 | AW799269 | | gb: RC0-UM0051-210300-012-f01 UM0051 Homo | 6.65 | 0.12 | upregulate stage |
| 410785 | AW803341 | | gb: IL2-UM0079-090300-050-D03 UM0079 Homo | 1.4 | 0.16 | upregulate stage |
| 410968 | AA199907 | Hs.67397 | homeo box A1 | 3.05 | 0.1 | upregulate stage |
| 411162 | AW819944 | | gb: QV0-ST0294-240300-172-e03 ST0294 Homo | 2 | 0.23 | upregulate stage |
| 411173 | R81571 | | gb: yj02h10.r1 Soares placenta Nb2HP Homo | 7.2 | 0.1 | upregulate stage |
| 411243 | AB039886 | Hs.69319 | CA11 | 0.36 | 0.93 | upregulate stage |
| 411407 | R00903 | | gb: ye87a07.r1 Soares fetal liver spleen | 8 | 0.09 | upregulate stage |
| 411704 | AI499220 | Hs.71573 | hypothetical protein FLJ10074 | 1.75 | 0.22 | upregulate stage |
| 412121 | AB033061 | Hs.73287 | KIAA1235 protein | 5.3 | 0.11 | upregulate stage |
| 412123 | BE251328 | Hs.73291 | hypothetical protein FLJ10881 | 6.9 | 0.1 | upregulate stage |
| 412129 | M21984 | Hs.73454 | troponin T3, skeletal, fast | 0.27 | 1.06 | upregulate stage |
| 412354 | AW939148 | | gb: QV1-DT0069-110200-067-d06 DT0069 Homo | 6.9 | 0.11 | upregulate stage |
| 412610 | X90908 | Hs.74126 | fatty acid binding protein 6, ileal (gas | 2.88 | 0.21 | upregulate stage |
| 412700 | BE222433 | Hs.201262 | ESTs | 2.85 | 0.15 | upregulate stage |
| 412706 | R97106 | Hs.167546 | ESTs | 3.75 | 0.16 | upregulate stage |
| 412935 | BE267045 | Hs.75064 | tubulin-specific chaperone c | 7 | 0.09 | upregulate stage |
| 413402 | T24065 | | gb: seq2245 HMSWMYK Homo sapiens cDNA clo | 6.3 | 0.12 | upregulate stage |
| 413431 | AW246428 | Hs.75355 | ubiquitin-conjugating enzyme E2N (homolo | 3.45 | 0.11 | upregulate stage |
| 413445 | BE141022 | | gb: MR0-HT0067-201099-002-d10 HT0067 Homo | 3.9 | 0.13 | upregulate stage |
| 413587 | AA156164 | Hs.271833 | Homo sapiens cDNA FLJ13473 fis, clone PL | 7.63 | 0.09 | upregulate stage |
| 413800 | AI129238 | Hs.192235 | ESTs | 3.2 | 0.18 | upregulate stage |
| 413859 | AW992356 | Hs.8364 | pyruvate dehydrogenase kinase, isoenzyme | 2.54 | 0.33 | upregulate stage |
| 413930 | M86153 | Hs.75618 | RAB11A, member RAS oncogene family | 1.75 | 0.21 | upregulate stage |
| 413991 | H44725 | Hs.71300 | ESTs | 1.3 | 0.21 | upregulate stage |
| 414052 | AW578849 | Hs.283552 | ESTs, Weakly similar to unnamed protein | 8.1 | 0.07 | upregulate stage |
| 414203 | BE262170 | | gb: 601150419F1 NIH_MGC_19 Homo sapiens c | 1.45 | 0.14 | upregulate stage |
| 414343 | AL036166 | Hs.75914 | coated vesicle membrane protein | 1 | 0.23 | upregulate stage |
| 414664 | AA587775 | Hs.66295 | Homo sapiens HSPC311 mRNA, partial cds | 1 | 0.36 | upregulate stage |
| 414987 | AA524394 | Hs.165544 | ESTs | 1.51 | 0.51 | upregulate stage |
| 414993 | AW819403 | Hs.77724 | KIAA0586 gene product | 2.72 | 0.23 | upregulate stage |
| 415276 | U88666 | Hs.78353 | SFRS protein kinase 2 | 6.95 | 0.1 | upregulate stage |
| 415303 | R11813 | | gb: yf53a04.r1 Soares infant brain 1NIB H | 8.1 | 0.09 | upregulate stage |
| 415392 | Z44067 | | gb: HSC1RF051 normalized infant brain cDN | 5.56 | 0.11 | upregulate stage |
| 415572 | F12294 | | gb: HSC38B051 normalized infant brain cDN | 5.7 | 0.11 | upregulate stage |
| 415773 | R21651 | | gb: yh19g02.r1 Soares placenta Nb2HP Homo | 5.3 | 0.11 | upregulate stage |
| 416012 | AF061959 | Hs.78961 | protein phosphatase 1, regulatory (inhib | 2.19 | 0.28 | upregulate stage |
| 416074 | R40174 | Hs.21209 | ESTs | 7.61 | 0.11 | upregulate stage |
| 416182 | NM_004354 | Hs.79069 | cyclin G2 | 1 | 0.39 | upregulate stage |
| 416518 | H60730 | Hs.18917 | ESTs | 6.6 | 0.1 | upregulate stage |
| 416782 | L35035 | Hs.79886 | ribose 5-phosphate isomerase A (ribose 5 | 3.9 | 0.17 | upregulate stage |
| 416987 | D86957 | Hs.80712 | KIAA0202 protein | 2.54 | 0.31 | upregulate stage |
| 417094 | NM_006895 | Hs.81182 | histamine N-methyltransferase | 4.26 | 0.12 | upregulate stage |
| 417275 | X63578 | Hs.81849 | parvalbumin | 1 | 0.12 | upregulate stage |
| 417395 | BE564245 | Hs.82084 | integrin beta 3 binding protein (beta3-e | 8.4 | 0.08 | upregulate stage |
| 417683 | AW566008 | Hs.239154 | Homo sapiens cDNA FLJ12814 fis, clone NT | 2.2 | 0.17 | upregulate stage |
| 417759 | R13567 | Hs.12548 | ESTs | 8.18 | 0.09 | upregulate stage |
| 417848 | AA206581 | Hs.39457 | ESTs | 8.6 | 0.08 | upregulate stage |
| 417985 | AA187545 | Hs.83114 | crystallin, zeta (quinone reductase) | 7 | 0.11 | upregulate stage |
| 418073 | R39789 | Hs.119714 | EST | 6.3 | 0.11 | upregulate stage |
| 418394 | AF132818 | Hs.84728 | Kruppel-like factor 5 (intestinal) | 1.63 | 0.46 | upregulate stage |
| 418406 | X73501 | Hs.84905 | cytokeratin 20 | 3.5 | 0.02 | upregulate stage |
| 418555 | AI417215 | Hs.87159 | Homo sapiens cDNA FLJ12577 fis, clone NT | 6.75 | 0.06 | upregulate stage |
| 418636 | AW749855 | | gb: QV4-BT0534-281299-053-c05 BT0534 Homo | 4.1 | 0.11 | upregulate stage |
| 418786 | AI796317 | Hs.203594 | Homo sapiens uncharacterized gastric pro | 7.5 | 0.08 | upregulate stage |
| 418827 | BE327311 | Hs.47166 | HT021 | 5.6 | 0.13 | upregulate stage |
| 418948 | AI217097 | | gb: qd43h07.x1 Soares_fetal_heart_NbHH19W | 1.5 | 0.22 | upregulate stage |
| 419551 | AW582256 | Hs.91011 | anterior gradient 2 (Xenepus laevis) hom | 2.44 | 0.29 | upregulate stage |
| 419590 | AF005043 | Hs.91390 | poly (ADP-ribose) glycohydrolase | 8.08 | 0.1 | upregulate stage |
| 419693 | AA133749 | Hs.92323 | FXYD domain-containing ion transport reg | 1.64 | 0.48 | upregulate stage |
| 419712 | AA360838 | Hs.179909 | Homo sapiens cDNA: FLJ22995 fis, clone K | 5.4 | 0.11 | upregulate stage |
| 419713 | AW968058 | Hs.92381 | nudix (nucleoside diphosphate linked moi | 7.9 | 0.06 | upregulate stage |
| 419720 | AA249131 | Hs.143607 | hypothetical protein FLJ11068 | 2.95 | 0.15 | upregulate stage |
| 419791 | AI579909 | Hs.105104 | ESTs | 2.45 | 0.2 | upregulate stage |
| 419872 | AI422951 | Hs.146162 | ESTs | 4.25 | 0.17 | upregulate stage |
| 419903 | T16938 | Hs.87902 | ESTs | 2.5 | 0.22 | upregulate stage |
| 419932 | AA281594 | | gb: zt03a01.r1 NCI_CGAP_GCB1 Homo sapiens | 6.1 | 0.12 | upregulate stage |
| 420026 | AI831190 | Hs.166676 | ESTs | 3.4 | 0.14 | upregulate stage |
| 420187 | AK001714 | Hs.95744 | hypothetical protein similar to ankyrin | 4.03 | 0.18 | upregulate stage |
| 420193 | AI460080 | Hs.202869 | ESTs | 1 | 0.28 | upregulate stage |
| 420281 | AI623693 | Hs.191533 | ESTs | 6.6 | 0.11 | upregulate stage |
| 420337 | AW295840 | Hs.14555 | Homo sapiens cDNA: FLJ21513 fis, clone C | 6 | 0.09 | upregulate stage |
| 420370 | Y13645 | Hs.97234 | uroplakin 2 | 1.2 | 0.45 | upregulate stage |
| 420383 | T55154 | Hs.144880 | ESTs | 3.8 | 0.12 | upregulate stage |
| 420450 | AW968969 | Hs.177726 | ESTs | 2.75 | 0.14 | upregulate stage |
| 420588 | AF000982 | Hs.147916 | DEAD/H (Asp-Glu-Ala-Asp/His) box polypep | 8.1 | 0.09 | upregulate stage |
| 420763 | AA419392 | Hs.178354 | ESTs | 8 | 0.09 | upregulate stage |
| 420838 | AW118210 | Hs.5244 | ESTs | 8.65 | 0.07 | upregulate stage |
| 420981 | L40904 | Hs.100724 | peroxisome proliferative activated recep | 1.98 | 0.32 | upregulate stage |
| 421013 | M62397 | Hs.1345 | mutated in colorectal cancers | 1 | 0.29 | upregulate stage |
| 421072 | AI215069 | Hs.89113 | ESTs | 5.8 | 0.12 | upregulate stage |
| 421110 | AJ250717 | Hs.1355 | cathepsin E | 5.45 | 0.03 | upregulate stage |
| 421141 | AW117261 | Hs.125914 | ESTs | 2.75 | 0.16 | upregulate stage |
| 421338 | AA287443 | | gb: zs52c10.r1 NCI_CGAP_GCB1 Homo sapiens | 7.45 | 0.09 | upregulate stage |
| 421508 | NM_004833 | Hs.105115 | absent in melanoma 2 | 4.21 | 0.19 | upregulate stage |
| 421634 | AA437414 | Hs.106283 | hypothetical protein FLJ10262 | 7.79 | 0.08 | upregulate stage |
| 421674 | T10707 | Hs.296355 | neuronal PAS domain protein 2 | 7.5 | 0.1 | upregulate stage |
| 421810 | AK001718 | Hs.108530 | hypothetical protein FLJ10856 | 8.45 | 0.08 | upregulate stage |
| 421855 | F06504 | Hs.27384 | ESTs | 2.9 | 0.16 | upregulate stage |
| 421898 | AA259011 | Hs.109268 | hypothetical protein FLJ12552 | 7.06 | 0.11 | upregulate stage |
| 422156 | N34524 | Hs.300893 | ESTs, Weakly similar to envelope protein | 3.75 | 0.16 | upregulate stage |
| 422225 | BE245652 | Hs.118281 | zinc finger protein 266 | 2.95 | 0.17 | upregulate stage |
| 422243 | AW803733 | Hs.250655 | prothymosin, alpha (gene sequence 28) | 8.15 | 0.08 | upregulate stage |
| 422511 | AU076442 | Hs.117938 | collagen, type XVII, alpha 1 | 2.21 | 0.17 | upregulate stage |
| 422634 | NM_016010 | Hs.118821 | CGI-62 protein | 1.3 | 0.29 | upregulate stage |
| 422988 | AW673847 | Hs.97321 | ESTs | 4.15 | 0.11 | upregulate stage |
| 423081 | AF262992 | Hs.123159 | sperm associated antigen 4 | 2.82 | 0.3 | upregulate stage |
| 423596 | AA328195 | Hs.234101 | ESTs, Weakly similar to CTL1 protein [H. | 2.75 | 0.19 | upregulate stage |
| 423872 | AB020316 | Hs.134015 | uronyl 2-sulfotransferase | 1.95 | 0.13 | upregulate stage |
| 423979 | AF229181 | Hs.136644 | CS box-containing WD protein | 7.12 | 0.11 | upregulate stage |
| 424005 | AB033041 | Hs.137507 | KIAA1215 protein | 1.71 | 0.37 | upregulate stage |
| 424014 | AA333653 | Hs.24790 | KIAA1573 protein | 4.85 | 0.12 | upregulate stage |
| 424028 | AF055084 | Hs.153692 | KIAA0686 protein | 8.5 | 0.07 | upregulate stage |
| 424194 | BE245833 | Hs.169854 | hypothetical protein SP 192 | 6.1 | 0.1 | upregulate stage |
| 424308 | AW975531 | Hs.154443 | minichromosome maintenance deficient (S. | 6.59 | 0.11 | upregulate stage |
| 424550 | AI650541 | Hs.115298 | ESTs | 3.25 | 0.12 | upregulate stage |
| 424631 | AA688021 | Hs.179808 | ESTs | 5.45 | 0.11 | upregulate stage |
| 424659 | AW891298 | Hs.301877 | ESTs, Weakly similar to hSIAH2 [H. sapien | 3.55 | 0.15 | upregulate stage |
| 424704 | AI263293 | Hs.152096 | cytochrome P450, subfamily IIJ (arachido | 8.45 | 0.06 | upregulate stage |
| 424775 | AB014540 | Hs.153026 | SWAP-70 protein | 6.65 | 0.11 | upregulate stage |
| 424800 | AL035588 | Hs.153203 | MyoD family inhibitor | 1.94 | 0.3 | upregulate stage |
| 425066 | M82882 | Hs.154365 | E74-like factor 1 (ets domain transcript | 2.85 | 0.19 | upregulate stage |
| 425259 | AL049280 | Hs.155397 | Homo sapiens mRNA; cDNA DKFZp564K143 (fr | 5.2 | 0.1 | upregulate stage |
| 425277 | NM_001241 | Hs.155478 | cyclin T2 | 6 | 0.13 | upregulate stage |
| 425508 | AA991551 | Hs.97013 | ESTs | 5.67 | 0.1 | upregulate stage |
| 425689 | W16480 | Hs.24283 | ESTs | 4.55 | 0.13 | upregulate stage |
| 425721 | AC002115 | Hs.159309 | uroplakin 1A | 0.71 | 0.8 | upregulate stage |
| 426069 | H10807 | Hs.30998 | ESTs | 3.4 | 0.17 | upregulate stage |
| 426088 | AF038007 | Hs.166196 | ATPase, Class I, type 8B, member 1 | 6.84 | 0.09 | upregulate stage |
| 426110 | NM_002913 | Hs.166563 | replication factor C (activator 1) 1 (14 | 6.7 | 0.1 | upregulate stage |
| 426227 | U67058 | Hs.168102 | Human proteinase activated receptor-2 mR | 3.05 | 0.14 | upregulate stage |
| 426603 | AA382291 | | gb: EST95683 Testis I Homo sapiens cDNA 5 | 1.8 | 0.26 | upregulate stage |
| 426657 | NM_015865 | Hs.171731 | solute carrier family 14 (urea transport | 0.96 | 0.36 | upregulate stage |
| 426716 | NM_006379 | Hs.171921 | sema domain, immunoglobulin domain (Ig), | 1.32 | 0.49 | upregulate stage |
| 426902 | AI125334 | Hs.97408 | ESTs | 5.05 | 0.07 | upregulate stage |
| 426931 | NM_003416 | Hs.2076 | zinc finger protein 7 (KOX 4, clone HF.1 | 2.95 | 0.12 | upregulate stage |
| 427001 | NM_006482 | Hs.173135 | dual-specificity tyrosine-(Y)-phosphoryl | 4.9 | 0.13 | upregulate stage |
| 427087 | BE073913 | Hs.173515 | uncharacterized hypothalamus protein HT0 | 0.57 | 0.86 | upregulate stage |
| 427398 | AW390020 | Hs.20415 | chromosome 21 open reading frame 11 | 1.86 | 0.31 | upregulate stage |
| 427399 | NM_014883 | Hs.177664 | KIAA0914 gene product | 5 | 0.13 | upregulate stage |
| 427450 | AB014526 | Hs.178121 | KIAA0626 gene product | 5.3 | 0.09 | upregulate stage |
| 427490 | Z95152 | Hs.178695 | mitogen-activated protein kinase 13 | 6.37 | 0.13 | upregulate stage |
| 427737 | AA435988 | Hs.178066 | ESTs, Weakly similar to AF068289 5 HDCME | 5.7 | 0.11 | upregulate stage |
| 428042 | AA419529 | | gb: zv03d12.r1 Soares_NhHMPu_S1 Homo sapi | 1.65 | 0.14 | upregulate stage |
| 428336 | AA503115 | Hs.183752 | microseminoprotein, beta- | 5.37 | 0.05 | upregulate stage |
| 428337 | AA644508 | | gb: af73c01.r1 Soares_NhHMPu_S1 Homo sapi | 3.4 | 0.13 | upregulate stage |
| 428365 | AA295331 | Hs.183861 | Homo sapiens cDNA FLJ20042 fis, clone CO | 1 | 0.17 | upregulate stage |
| 428471 | X57348 | Hs.184510 | stratifin | 1.81 | 0.39 | upregulate stage |
| 428583 | AA430589 | Hs.301374 | ESTs, Moderately similar to ALU5_HUMAN A | 7.55 | 0.11 | upregulate stage |
| 428670 | AA431682 | Hs.134832 | ESTs | 8.05 | 0.1 | upregulate stage |
| 428785 | AI015953 | Hs.125265 | ESTs | 1.65 | 0.15 | upregulate stage |
| 429332 | AF030403 | Hs.199263 | Ste-20 related kinase | 2.64 | 0.26 | upregulate stage |
| 429343 | AK000785 | Hs.199480 | epsin 3 | 3.15 | 0.27 | upregulate stage |
| 429556 | AW139399 | Hs.98988 | ESTs | 1.87 | 0.31 | upregulate stage |
| 429663 | M68874 | Hs.211587 | phospholipase A2, group IVA (cytosolic, | 0.61 | 1.02 | upregulate stage |
| 429824 | AA296363 | Hs.121520 | Human BAC clone GS1-99H8 | 2.03 | 0.39 | upregulate stage |
| 429966 | BE081342 | Hs.226799 | HSPC039 protein | 7.85 | 0.08 | upregulate stage |
| 429970 | AK000072 | Hs.227059 | chloride channel, calcium activated, fam | 1 | 0.61 | upregulate stage |
| 430042 | AB023170 | Hs.227850 | KIAA0953 protein | 2.5 | 0.17 | upregulate stage |
| 430168 | AW968343 | Hs.300896 | ESTs, Highly similar to AF128113 1 promi | 1.98 | 0.4 | upregulate stage |
| 430308 | BE540865 | Hs.238990 | cyclin-dependent kinase inhibitor 18 (p2 | 6.7 | 0.09 | upregulate stage |
| 430399 | AI916284 | Hs.199671 | ESTs | 8.09 | 0.08 | upregulate stage |
| 430763 | AA485468 | Hs.105658 | ESTs | 3.18 | 0.24 | upregulate stage |
| 431474 | AL133990 | Hs.190642 | ESTs | 0.37 | 0.51 | upregulate stage |
| 431567 | N51357 | Hs.260855 | Homo sapiens mRNA; cDNA DKFZp761G2311 (f | 1.74 | 0.39 | upregulate stage |
| 431585 | BE242803 | Hs.262823 | hypothetical protein FLJ10326 | 3.55 | 0.15 | upregulate stage |
| 431683 | AK001749 | Hs.267604 | hypothetical protein FLJ10450 | 8.55 | 0.08 | upregulate stage |
| 431709 | AF220185 | Hs.267923 | uncharacterized hypothalamus protein HT0 | 7.95 | 0.1 | upregulate stage |
| 431846 | BE019924 | Hs.271580 | uroplakin 1B | 1.33 | 0.5 | upregulate stage |
| 431912 | AI660552 | Hs.154903 | ESTs, Weakly similar to A56154 AbI subst | 4.15 | 0.12 | upregulate stage |
| 432350 | NM_005865 | Hs.274407 | protease, serine, 16 (thymus) | 3.7 | 0.13 | upregulate stage |
| 432520 | AI075978 | Hs.188007 | ESTs | 2.05 | 0.22 | upregulate stage |
| 432524 | AI458020 | Hs.293287 | ESTs | 5.15 | 0.14 | upregulate stage |
| 432540 | AI821517 | Hs.105866 | ESTs | 5.5 | 0.11 | upregulate stage |
| 432623 | AA557351 | Hs.152448 | ESTs, Moderately similar to PUR6_HUMAN M | 8.43 | 0.09 | upregulate stage |
| 432632 | AW973801 | Hs.134656 | ESTs | 2.45 | 0.16 | upregulate stage |
| 432820 | AI554057 | Hs.152477 | ESTs | 8.29 | 0.09 | upregulate stage |
| 432945 | AL043683 | Hs.271357 | ESTs, Weakly similar to unnamed protein | 3.22 | 0.23 | upregulate stage |
| 433027 | AF191018 | Hs.279923 | putative nucleotide binding protein, est | 2.15 | 0.39 | upregulate stage |
| 433037 | NM_014158 | Hs.279938 | HSPC067 protein | 5.1 | 0.11 | upregulate stage |
| 433156 | R59206 | Hs.17519 | Homo sapiens cDNA: FLJ22539 fis, clone H | 7.9 | 0.1 | upregulate stage |
| 433171 | AA579425 | | gb: nf37c08.s1 NCI_CGAP_Pr2 Homo sapiens | 3.54 | 0.14 | upregulate stage |
| 433311 | AA688149 | | gb: nv16h12.s1 NCI_CGAP_Pr22 Homo sapiens | 6.6 | 0.08 | upregulate stage |
| 433383 | AF034837 | Hs.192731 | double-stranded RNA specific adenosine d | 2.45 | 0.21 | upregulate stage |
| 433409 | AI278802 | Hs.25661 | ESTs | 4.75 | 0.1 | upregulate stage |
| 433650 | AA603472 | Hs.28456 | ESTs | 1.6 | 0.18 | upregulate stage |
| 433675 | AW977653 | Hs.110771 | Homo sapiens cDNA: FLJ21904 fis, clone H | 3.88 | 0.17 | upregulate stage |
| 434328 | BE564937 | Hs.15984 | pp21 homolog | 3 | 0.15 | upregulate stage |
| 434476 | AW858520 | Hs.271825 | ESTs | 4.6 | 0.1 | upregulate stage |
| 434683 | AW298724 | Hs.202639 | ESTs | 2.1 | 0.19 | upregulate stage |
| 434726 | AF062719 | Hs.139053 | ESTs | 1.76 | 0.34 | upregulate stage |
| 435124 | AA725362 | Hs.120456 | ESTs | 7.7 | 0.09 | upregulate stage |
| 435563 | AF210317 | Hs.95497 | solute carrier family 2 (facilitated glu | 5.8 | 0.09 | upregulate stage |
| 435899 | W89093 | Hs.189914 | ESTs | 1.32 | 0.42 | upregulate stage |
| 436026 | AI349764 | Hs.217081 | ESTs | 1 | 0.22 | upregulate stage |
| 436154 | AA764950 | Hs.119898 | ESTs | 8.4 | 0.05 | upregulate stage |
| 436293 | AI601188 | Hs.120910 | ESTs | 2.42 | 0.2 | upregulate stage |
| 436361 | AA825814 | Hs.149065 | ESTs | 6.95 | 0.09 | upregulate stage |
| 436455 | AI027959 | Hs.132300 | ESTs | 3.25 | 0.15 | upregulate stage |
| 436577 | W84774 | Hs.17643 | ESTs | 6.3 | 0.06 | upregulate stage |
| 436684 | AW976319 | Hs.94806 | KIAA1062 protein | 4.75 | 0.12 | upregulate stage |
| 437036 | AI571514 | Hs.133022 | ESTs | 1.4 | 0.13 | upregulate stage |
| 437146 | AA730977 | | gb: nw55f05.s1 NCI_CGAP_Ew1 Homo sapiens | 1 | 0.37 | upregulate stage |
| 437262 | BE250537 | Hs.174838 | Homo sapiens cDNA FLJ14192 fis, clone NT | 3.25 | 0.17 | upregulate stage |
| 437277 | AA748016 | Hs.123370 | ESTs | 6.75 | 0.09 | upregulate stage |
| 437882 | AI243203 | Hs.131572 | ESTs | 8.12 | 0.09 | upregulate stage |
| 438392 | AA806395 | Hs.123205 | ESTs | 1 | 0.34 | upregulate stage |
| 438416 | N76398 | Hs.21187 | Homo sapiens cDNA: FLJ23068 fis, clone L | 8.1 | 0.1 | upregulate stage |
| 438739 | AA815391 | | gb: ai61c02.s1 Soares_testis_NHT Homo sap | 4.69 | 0.12 | upregulate stage |
| 439211 | AI890347 | Hs.271923 | Homo sapiens cDNA: FLJ22785 fis, clone K | 6.65 | 0.11 | upregulate stage |
| 439394 | AA149250 | Hs.56105 | ESTs, Weakly similar to WDNM RAT WDNM1 P | 3.19 | 0.11 | upregulate stage |
| 439544 | W26354 | Hs.28891 | hypothetical protein FLJ11360 | 2.3 | 0.34 | upregulate stage |
| 439569 | AW602166 | Hs.222399 | CEGP1 protein | 0.73 | 0.51 | upregulate stage |
| 439586 | AA922936 | Hs.110039 | ESTs | 4.3 | 0.1 | upregulate stage |
| 439706 | AW872527 | Hs.59761 | ESTs | 1 | 0.14 | upregulate stage |
| 439897 | NM_015310 | Hs.6763 | KIAA0942 protein | 8.4 | 0.08 | upregulate stage |
| 439898 | AW505514 | Hs.209561 | ESTs, Weakly similar to C05E11.1 gene pr | 7.35 | 0.1 | upregulate stage |
| 439949 | AW979197 | Hs.292073 | ESTs | 8.55 | 0.08 | upregulate stage |
| 440035 | BE561589 | Hs.285122 | hypothetical protein FLJ21839 | 6 | 0.11 | upregulate stage |
| 440619 | AW408586 | Hs.91052 | ESTs, Moderately similar to ALU5_HUMAN A | 7.95 | 0.07 | upregulate stage |
| 440635 | AW610331 | | gb: RC4-ST0316-190100-011-c08 ST0316 Homo | 5.95 | 0.11 | upregulate stage |
| 440787 | AW292043 | Hs.209433 | ESTs | 5.05 | 0.12 | upregulate stage |
| 441233 | AA972965 | Hs.135568 | ESTs | 1.7 | 0.12 | upregulate stage |
| 441528 | AI003797 | Hs.130815 | hypothetical protein FLJ21870 | 7.2 | 0.09 | upregulate stage |
| 441670 | AW874090 | Hs.127392 | ESTs, Moderately similar to p33ING1 [H. s | 2.45 | 0.19 | upregulate stage |
| 441683 | BE564214 | Hs.102946 | ESTs | 5.9 | 0.13 | upregulate stage |
| 441847 | AI215564 | Hs.220972 | ESTs | 6.95 | 0.11 | upregulate stage |
| 442145 | AI022650 | Hs.8117 | erbb2-interacting protein ERBIN | 3 | 0.19 | upregulate stage |
| 442299 | AW467791 | Hs.155561 | ESTs | 5.05 | 0.13 | upregulate stage |
| 442315 | AA173992 | Hs.7956 | ESTs | 3.97 | 0.17 | upregulate stage |
| 442528 | AF150317 | Hs.134217 | ESTs | 1.4 | 0.34 | upregulate stage |
| 442571 | C06338 | Hs.165464 | ESTs | 8 | 0.08 | upregulate stage |
| 442607 | AA507576 | Hs.288361 | Homo sapiens cDNA: FLJ22696 fis, clone H | 6.7 | 0.1 | upregulate stage |
| 442652 | AI005163 | Hs.201378 | ESTs, Weakly similar to KIAA0944 protein | 7.15 | 0.11 | upregulate stage |
| 442947 | R40800 | Hs.21303 | ESTs | 8.5 | 0.08 | upregulate stage |
| 442993 | BE018682 | Hs.44343 | ESTs | 1.91 | 0.34 | upregulate stage |
| 443015 | R33261 | Hs.6614 | ESTs | 8.5 | 0.09 | upregulate stage |
| 443085 | AI032660 | Hs.164711 | ESTs | 4 | 0.13 | upregulate stage |
| 443228 | W24781 | Hs.293798 | ESTs | 1.61 | 0.47 | upregulate stage |
| 443367 | AW071349 | Hs.215937 | ESTs | 1.75 | 0.29 | upregulate stage |
| 443371 | AI792888 | Hs.145489 | ESTs | 5.85 | 0.11 | upregulate stage |
| 443564 | AI921685 | Hs.199713 | ESTs | 1.4 | 0.18 | upregulate stage |
| 443638 | AW028696 | Hs.145679 | ESTs | 3.25 | 0.15 | upregulate stage |
| 443677 | AV646096 | Hs.293776 | ESTs, Weakly similar to 1207289A reverse | 6.45 | 0.11 | upregulate stage |
| 443861 | AW449462 | Hs.134743 | ESTs | 6.72 | 0.09 | upregulate stage |
| 444097 | AW517412 | Hs.150757 | ESTs | 4.25 | 0.11 | upregulate stage |
| 444171 | AB018249 | Hs.10458 | small inducible cytokine subfamily A (Cy | 8.45 | 0.09 | upregulate stage |
| 444184 | T87841 | Hs.282990 | Human DNA sequence from clone RP1-28H20 | 8.1 | 0.1 | upregulate stage |
| 444385 | BE278964 | Hs.11085 | CGI-111 protein | 8.6 | 0.09 | upregulate stage |
| 444624 | AV650476 | Hs.282936 | ESTs | 7.52 | 0.1 | upregulate stage |
| 444631 | AW995395 | Hs.84520 | ESTs | 1.25 | 0.21 | upregulate stage |
| 444707 | AI188613 | Hs.143866 | ESTs | 2.1 | 0.21 | upregulate stage |
| 444735 | BE019923 | Hs.243122 | hypothetical protein FLJ13057 similar to | 6.8 | 0.1 | upregulate stage |
| 444779 | AI192105 | Hs.147170 | ESTs | 0.94 | 0.6 | upregulate stage |
| 444823 | BE262989 | Hs.12045 | putative protein | 8.09 | 0.1 | upregulate stage |
| 444858 | AI199738 | Hs.208275 | ESTs, Weakly similar to unnamed protein | 4.6 | 0.09 | upregulate stage |
| 444875 | AI200759 | Hs.44737 | ESTs | 6.85 | 0.11 | upregulate stage |
| 444888 | AI651039 | Hs.148559 | ESTs | 3.15 | 0.18 | upregulate stage |
| 445076 | AI206888 | Hs.154131 | ESTs | 7.81 | 0.09 | upregulate stage |
| 445182 | AW189787 | Hs.147474 | ESTs | 2 | 0.07 | upregulate stage |
| 445189 | AI936450 | Hs.147482 | ESTs | 2.65 | 0.12 | upregulate stage |
| 445320 | AA503887 | Hs.167011 | Homo sapiens cDNA: FLJ21362 fis, clone C | 1.47 | 0.46 | upregulate stage |
| 445594 | AW058463 | Hs.12940 | zinc-fingers and homeoboxes 1 | 6.2 | 0.07 | upregulate stage |
| 445674 | BE410347 | Hs.13063 | transcription factor CA150 | 3.8 | 0.15 | upregulate stage |
| 445817 | NM_003642 | Hs.13340 | histone acetyltransferase 1 | 5.6 | 0.1 | upregulate stage |
| 445871 | AI702901 | Hs.145582 | ESTs | 2.3 | 0.33 | upregulate stage |
| 446140 | AA356170 | Hs.26750 | Homo sapiens cDNA: FLJ21908 fis, clone H | 2.15 | 0.18 | upregulate stage |
| 446553 | AB021179 | Hs.15299 | HMBA-inducible | 2.55 | 0.18 | upregulate stage |
| 446651 | AA393907 | Hs.97179 | ESTs | 8.05 | 0.07 | upregulate stage |
| 447086 | AI421397 | Hs.161321 | ESTs | 6.9 | 0.1 | upregulate stage |
| 447290 | AI476732 | Hs.263912 | ESTs | 2.35 | 0.18 | upregulate stage |
| 447379 | AI554946 | Hs.158794 | ESTs | 6.3 | 0.09 | upregulate stage |
| 447390 | X95384 | Hs.18426 | translational inhibitor protein p14.5 | 7.25 | 0.08 | upregulate stage |
| 447533 | NM_004786 | Hs.18792 | thioredoxin-like, 32 kD | 1 | 0.24 | upregulate stage |
| 447548 | N53388 | Hs.7222 | ESTs | 8.6 | 0.07 | upregulate stage |
| 447731 | AA373527 | Hs.19385 | CGI-58 protein | 7.3 | 0.08 | upregulate stage |
| 447853 | AI434204 | Hs.164285 | ESTs, Weakly similar to Afg1p [S. cerevis | 6.75 | 0.11 | upregulate stage |
| 447857 | AA081218 | Hs.58608 | Homo sapiens cDNA FLJ14206 fis, clone NT | 2.2 | 0.24 | upregulate stage |
| 447965 | AW292577 | Hs.94445 | ESTs | 3.6 | 0.13 | upregulate stage |
| 448072 | AI459306 | Hs.24908 | ESTs | 5.8 | 0.11 | upregulate stage |
| 448474 | AI792014 | Hs.13809 | ESTs | 2.72 | 0.28 | upregulate stage |
| 448513 | AA344741 | Hs.61773 | Homo sapiens cDNA FLJ11648 fis, clone HE | 4.8 | 0.12 | upregulate stage |
| 448601 | R61666 | Hs.293690 | ESTs | 2.65 | 0.2 | upregulate stage |
| 448625 | AW970786 | Hs.178470 | Homo sapiens cDNA: FLJ22662 fis, clone H | 1.68 | 0.44 | upregulate stage |
| 448735 | AW473830 | Hs.171442 | ESTs | 2.95 | 0.19 | upregulate stage |
| 448807 | AI571940 | Hs.7549 | ESTs | 2.3 | 0.14 | upregulate stage |
| 448920 | AW408009 | Hs.22580 | alkylglycerone phosphate synthase | 8.6 | 0.08 | upregulate stage |
| 449448 | D60730 | Hs.57471 | ESTs | 1 | 0.13 | upregulate stage |
| 449517 | AW500106 | Hs.23643 | serine/threonine protein kinase MASK | 6.4 | 0.11 | upregulate stage |
| 449585 | AI655321 | Hs.197693 | ESTs | 1 | 0.16 | upregulate stage |
| 449619 | AI655992 | Hs.300647 | ESTs | 8.35 | 0.09 | upregulate stage |
| 449659 | R60031 | Hs.198899 | eukaryotic translation initiation factor | 6.65 | 0.11 | upregulate stage |
| 449689 | AF228421 | Hs.301039 | Human DNA sequence from clone RP1-132F21 | 8.35 | 0.06 | upregulate stage |
| 449901 | AI674072 | | gb: wd15h01.x1 Soares_NFL_T_GBC_S1 Homo s | 5.8 | 0.1 | upregulate stage |
| 449964 | AW001741 | Hs.273193 | hypothetical protein FLJ10706 | 8.7 | 0.09 | upregulate stage |
| 450170 | AI685366 | Hs.32775 | ESTs | 6.77 | 0.12 | upregulate stage |
| 450193 | AI916071 | Hs.224623 | ESTs | 5.73 | 0.1 | upregulate stage |
| 450336 | AA046814 | Hs.288928 | Homo sapiens cDNA: FLJ23296 fis, clone H | 8.2 | 0.08 | upregulate stage |
| 450341 | N90956 | Hs.17230 | hypothetical protein FLJ22087 | 4.2 | 0.19 | upregulate stage |
| 450353 | AI244661 | Hs.103296 | ESTs | 4.71 | 0.15 | upregulate stage |
| 450737 | AW007152 | Hs.203330 | ESTs | 2.14 | 0.25 | upregulate stage |
| 450795 | AW173371 | Hs.60435 | ESTs | 6 | 0.1 | upregulate stage |
| 450928 | AI744417 | | gb: tr10h12.x1 NCI_CGAP_Ov23 Homo sapiens | 1.75 | 0.18 | upregulate stage |
| 451134 | AA318315 | Hs.25999 | hypothetical protein FLJ22195 | 4.3 | 0.1 | upregulate stage |
| 451230 | BE546208 | Hs.26090 | hypothetical protein FLJ20272 | 4.75 | 0.16 | upregulate stage |
| 451593 | AF151879 | Hs.26706 | CGI-121 protein | 5.8 | 0.11 | upregulate stage |
| 451618 | AA115639 | Hs.26764 | KIAA0546 protein | 5.8 | 0.13 | upregulate stage |
| 451668 | Z43948 | Hs.26789 | hypothetical protein FLJ10320 | 0.73 | 0.26 | upregulate stage |
| 451790 | AA927403 | Hs.43897 | ESTs, Weakly similar to P2CA_HUMAN PROTE | 3.2 | 0.25 | upregulate stage |
| 452001 | AI827675 | Hs.297735 | Homo sapiens cDNA: FLJ22094 fis, clone H | 3.7 | 0.13 | upregulate stage |
| 452039 | AI922988 | Hs.172510 | ESTs | 1 | 0.65 | upregulate stage |
| 452046 | AB018345 | Hs.27657 | KIAA0802 protein | 1.13 | 0.39 | upregulate stage |
| 452092 | BE245374 | Hs.27842 | hypothetical protein FLJ11210 | 3.2 | 0.15 | upregulate stage |
| 452278 | AL037715 | Hs.28785 | Homo sapiens mRNA; cDNA DKFZp586F0219 (f | 8.25 | 0.07 | upregulate stage |
| 452381 | H23329 | Hs.290880 | ESTs, Weakly similar to ALU1_HUMAN ALU S | 1 | 0.34 | upregulate stage |
| 452420 | BE564871 | Hs.29463 | centrin, EF-hand protein, 3 (CDC31 yeast | 4.97 | 0.13 | upregulate stage |
| 452714 | AW770994 | Hs.30340 | hypothetical protein KIAA1165 | 7.6 | 0.09 | upregulate stage |
| 453078 | AF053551 | Hs.31584 | metaxin 2 | 5.3 | 0.09 | upregulate stage |
| 453370 | AI470523 | Hs.182356 | ESTs, Moderately similar to translation | 3.78 | 0.13 | upregulate stage |
| 453765 | BE279901 | Hs.35091 | hypothetical protein FLJ10775 | 3.95 | 0.11 | upregulate stage |
| 453972 | AW137224 | Hs.245869 | ESTs | 6 | 0.09 | upregulate stage |
| 454044 | AW022393 | | gb: df37h12.y1 Morton Fetal Cochlea Homo | 1.15 | 0.18 | upregulate stage |
| 454289 | AL137554 | Hs.49927 | Homo sapiens mRNA; cDNA DKFZp434H1720 (f | 7.05 | 0.1 | upregulate stage |
| 454314 | AW364844 | | gb: QV3-DT0044-221299-045-c03 DT0044 Homo | 1 | 0.37 | upregulate stage |
| 454315 | AW373564 | Hs.251928 | nuclear pore complex interacting protein | 2.7 | 0.13 | upregulate stage |
| 454775 | BE160229 | | gb: QV1-HT0413-090200-062-a12 HT0413 Homo | 8.5 | 0.09 | upregulate stage |
| 454790 | AW820852 | | gb: RC2-ST0301-120200-011-f12 ST0301 Homo | 1.15 | 0.14 | upregulate stage |
| 454792 | AW820794 | Hs.252406 | hypothetical protein FLJ12296 similar to | 3.65 | 0.12 | upregulate stage |
| 455170 | AW860972 | | gb: QV0-CT0387-180300-167-h07 CT0387 Homo | 5.7 | 0.07 | upregulate stage |
| 455511 | BE144762 | | gb: CM0-HT0180-041099-065-b04 HT0180 Homo | 1 | 0.25 | upregulate stage |
| 456141 | AI751357 | Hs.288741 | Homo sapiens cDNA: FLJ22256 fis, clone H | 8.35 | 0.09 | upregulate stage |
| 456258 | AW976410 | Hs.289069 | Homo sapiens cDNA: FLJ21016 fis, clone C | 4.85 | 0.14 | upregulate stage |
| 456279 | AW006783 | Hs.6686 | ESTs | 7.25 | 0.1 | upregulate stage |
| 457518 | AA825350 | Hs.143805 | ESTs, Weakly similar to ALU1_HUMAN ALU S | 6.84 | 0.11 | upregulate stage |
| 457570 | AA579426 | Hs.190226 | ESTs | 2.6 | 0.2 | upregulate stage |
| 457982 | AW856093 | Hs.183617 | ESTs | 1 | 0.25 | upregulate stage |
| 458080 | BE142728 | | gb: MR0-HT0157-021299-004-d08 HT0157 Homo | 2.05 | 0.27 | upregulate stage |
| 458340 | AI457102 | Hs.121583 | Human glucose transporter pseudogene | 2.25 | 0.18 | upregulate stage |
| 458440 | AI095468 | Hs.135254 | ESTs, Weakly similar to thrombospondin t | 2.35 | 0.13 | upregulate stage |
| 458771 | AW295151 | Hs.163612 | ESTs | 1 | 0.19 | upregulate stage |
| 459092 | AA722012 | Hs.255757 | ESTs, Weakly similar to KIAA0611 protein | 6.95 | 0.1 | upregulate stage |

Pkey: Unique Eos probeset identifier number
ExAccn: Exemplar Accession number, Genbank accession number
UnigeneID: Unigene number
Unigene Title: Unigene gene title
R1: please refer to original application
R2: please refer to original application
Target Type: downregulate stage if target is downregulated in bladder tumors relative to normal bladder or early stage if target is an earl stage (Ta) bladder tumor marker or late stage if target is a late stage (T2-T4) bladder tumor marker or T2-T4 grade 3 papilloma marker or T2-T4 grade 3 solid tumor marker or Upregulate stage

[0362] TABLE 1B

| Pkey | CAT | Accessions |
|---|---|---|
| 407774 | 101538_1 | AA084958 AA214034 AA044587 AA130152 AA130116 D81924 |
| 407939 | 1027688_1 | W05608 AW118352 AW196215 |
| 407980 | 103087_1 | AA046309 AI263500 AA046397 |
| 408224 | 1048369_1 | AW175997 AW176000 AW175999 AW175994 AW176004 AW175989 |
| 408241 | 1048867_1 | AW176546 AW178965 BE141057 |
| 408268 | 104987_1 | AL138247 AA053529 BE173313 |
| 408277 | 1050131_1 | AW177959 AW177960 AW178066 AW178022 |
| 408306 | 1050863_1 | BE141991 AW178855 BE141990 BE141993 BE141994 BE062405 BE062404 AW178850 |
| 409281 | 111502_1 | AA069998 AA075659 AA075660 AA069828 |
| 409408 | 1128045_1 | AW387837 AW387874 AW387826 AW387758 AW387864 AW809268 AW387754 |
| 409566 | 114012_1 | AA078899 AA078782 AA075788 |
| 409760 | 115373_1 | AA302840 T93016 T92950 AA077551 |
| 409794 | 1154785_1 | AW885691 BE185989 BE185940 AW500322 H10282 |
| 409810 | 1155339_1 | AW500895 AW937549 |
| 409840 | 1156071_1 | AW502122 AW502125 AW501663 AW501720 |
| 410071 | 1174764_1 | AW582568 AW818656 AW818647 AW818655 AW818637 AW818234 |
| 410128 | 117773_1 | AW904599 AA325920 AW964919 AA081786 T05150 |
| 410269 | 1189983_1 | AW613597 BE080235 BE080168 |
| 410475 | 1204788_1 | AW749927 AW749938 AW749986 AW749966 R87124 AW860547 |
| 410495 | 1205826_1 | N95428 W24040 AW751366 H81987 |
| 410520 | 1206965_1 | AW752710 BE180336 BE180186 |
| 410534 | 1207247_1 | AW905138 AW753008 R13818 Z43519 |
| 410537 | 1207336_1 | AW753108 AW852909 N36993 AW894327 AW903629 |
| 410560 | 1208311_1 | N29220 AW754225 AW754224 |
| 410562 | 1208415_1 | AW858528 AW754362 H74000 |
| 410724 | 1218202_1 | AW799269 AW799385 AW799501 AW799386 AW799270 AW799467 |
| 410751 | 121964_1 | AA357918 AA089516 AA357917 |
| 410754 | 1219733_1 | T63840 AW801569 AW801568 |
| 410785 | 1221055_1 | AW803341 AW803265 AW803403 AW803466 AW803402 AW803413 AW803268 AW803396 AW803334 AW803355 |
| 410844 | 1223878_1 | AW807073 AW807055 AW807067 AW807276 AW807030 AW807363 AW845892 AW807091 AW807275 AW807284 |
| | | AW807287 AW845891 AW807195 AW807271 |
| 410910 | 1226517_1 | AW810204 AW810555 AW810196 AW810619 AW810507 |
| 410973 | 1228236_1 | AW812278 AW812286 AW812274 |
| 410997 | 1228736_1 | AW812877 AW812878 AW812952 AW812880 |
| 411110 | 1232598_1 | H93000 AW818022 AW818044 |
| 411112 | 1232692_1 | AW818158 AW865743 AW865702 AW865698 |
| 411132 | 1233580_1 | AW819191 AW819252 AW819183 AW819175 AW819177 AW819186 AW819180 BE158470 AW819242 |
| | | AW819269 AW819244 AW819190 AW819265 AW819268 AW819246 BE152602 AW819249 AW819251 AW819263 |
| | | AW819194 |
| 411137 | 1233775_1 | AW819455 AW819711 AW819553 |
| 411157 | 1234099_1 | AW819867 AW819956 AW820159 |
| 411159 | 1234102_1 | AW820178 AW820183 AW819870 AW819937 AW835709 AW820184 AW820157 AW819945 AW820096 |
| 411162 | 1234161_1 | AW819944 AW820182 AW820168 AW819959 AW819953 |
| 411170 | 1234379_1 | AW820503 AW820306 AW820429 BE174741 AW820244 BE174738 |
| 411173 | 123446_1 | R81571 AW962014 AA324277 |
| 411193 | 1235254_1 | AW821484 AW821461 AW821490 AW821525 AW821526 AW821519 |
| 411242 | 1236393_1 | BE146808 BE146949 AW833828 BE147002 BE147066 AW833422 AW833475 AW833485 AW833414 |
| | | AW833406 AW833395 AW833640 AW833835 AW833421 BE146805 AW833465 BE146753 BE147004 AW833473 |
| | | AW833573 BE147068 AW833466 AW833680 BE147063 BE147058 BE146807 AW833830 AW833694 AW833596 |
| | | AW833601 |
| 411245 | 1236412_1 | AW833441 AW833552 AW833700 AW833610 AW833673 AW833675 |
| 411282 | 1237660_1 | AW995011 AW880630 AW995662 AW880196 AW860455 AW995379 AW880634 AW938253 AW880580 |
| | | AW938263 AW880584 AW860454 AW880603 AW880026 AW938265 AW880592 AW852203 AW880588 AW880680 |
| | | AW995392 AW880598 AW860603 AW880590 AW880175 AW846534 AW880098 AW880108 AW860453 AW938051 |
| | | AW995191 AW880532 AW880542 AW938197 AW994929 AW880635 AW835438 AW938057 AW938054 |
| 411327 | 1238874_1 | AW836922 AW876719 AW876688 AW836919 AW836997 AW836908 AW836912 AW836993 |
| 411336 | 1239216_1 | AW837675 AW837356 AW837581 AW837348 AW837681 |
| 411339 | 1239387_1 | BE164598 AW837578 AW837582 |
| 411407 | 1244071_1 | R00903 R20424 AW844169 |
| 411418 | 124518_1 | BE241870 AI752584 Z19223 AA307961 AA181165 AA093272 AW368570 |
| 411425 | 1245503_1 | AW846012 AW846007 AW845996 AW845975 |
| 411461 | 1246730_1 | AW847937 AW847672 AW847809 AW847923 AW847808 AW847616 |
| 411474 | 1247047_2 | AW848427 AW848890 AW848159 AW848118 AW848634 AW848285 AW848086 AW848485 AW848283 AW848162 |
| 411526 | 1248748_1 | AW850327 AW850350 AW850348 AW850375 |
| 411560 | 1249443_1 | AW851186 AW996967 BE143456 |
| 411568 | 1249776_1 | BE144593 AW851632 AW968149 AW968144 W21059 |
| 411691 | 1254166_1 | AW857199 BE066018 BE065982 BE066082 BE065949 BE066019 BE066081 BE065954 BE066084 |
| 411727 | 1255052_1 | AW858443 AW858436 AW861923 AW858551 AW861872 AW858474 AW861904 AW858398 |
| 411741 | 1255976_1 | AW859650 BE071806 AW859655 |
| 411771 | 1257335_1 | AW993247 AW861464 |
| 411787 | 1258789_1 | AW863568 BE161696 BE161629 BE161824 |
| 411788 | 125879_1 | AW897793 R20054 H23321 |
| 411826 | 1260006_1 | AW947946 AW947986 AW947977 AW865187 AW865246 AW865182 AW865376 AW865392 AW865184 |
| 411840 | 1260678_1 | AW866330 AW866410 AW866332 AW866411 AW866327 AW866326 AW866335 AW866334 AW866331 |
| | | AW866333 AW866328 AW866329 |
| 411860 | 126168_1 | T89420 N87510 AA095932 |
| 411880 | 1263110_1 | AW872477 BE088101 T05990 |
| 411932 | 1266125_1 | AW876548 AW876577 AW876528 AW876623 AW876519 AW876540 AW876569 AW876534 AW876563 AW876545 |
| | | AW876574 |
| 412134 | 1279147_1 | AW895560 AW895557 AW895314 AW895537 AW895287 AW895411 |
| 412178 | 1281471_1 | AW898526 AW898525 Z19700 |
| 412296 | 1288043_1 | AW936233 AW936272 |
| 412303 | 1288130_1 | AW936336 AW936339 |
| 412305 | 1288141_1 | AW936369 AW936377 AW936355 AW936410 AW936460 |
| 412312 | 1288349_1 | AW936686 AW936656 AW936608 AW936635 AW936652 AW936679 AW936726 AW936602 AW936733 |
| 412327 | 1288935_1 | AW937355 AW937450 BE162340 BE162397 |
| 412354 | 1290342_1 | AW939148 AW939200 BE161819 |
| 412357 | 1290611_1 | AW939537 AW939584 W92705 |
| 412359 | 129085_1 | AW837985 AW837938 AA101955 AW837913 AW837935 |
| 412367 | 1291505_1 | AW945964 AW946020 AW946034 AW946027 AW946041 AW946044 AW946033 AW946024 AW946021 AW946029 |
| | | AW946015 AW946016 AW946039 AW946045 AW946028 AW946036 |
| 412389 | 1292588_1 | AW947655 AW984020 |
| 412547 | 1305813_1 | W27161 AW961828 |
| 412559 | 1306011_1 | T31474 T31123 Z45146 AW962040 |
| 412671 | 1319959_1 | AW977734 H62048 |
| 412744 | 1324622_1 | N31101 N46491 AW994084 |
| 412838 | 1331178_1 | D61870 D61866 BE002674 |
| 413119 | 1349658_1 | BE065941 BE066098 BE066070 BE065997 BE066003 |
| 413141 | 1350477_1 | BE166323 BE067045 |
| 413266 | 1356260_1 | BE300352 BE299274 BE075351 BE297444 |
| 413294 | 1359149_1 | BE144034 N72932 BE080176 |
| 413342 | 136279_1 | AA128535 AW973587 AA553822 |
| 413402 | 1366932_1 | T24065 BE092527 BE092528 BE092204 BE092271 BE092516 BE092202 BE092280 BE092065 BE091991 BE092284 |
| | | BE092514 BE091995 BE092063 BE092068 BE091994 BE092283 BE092447 |
| 413445 | 1370833_1 | BE141022 BE141513 BE141532 BE141488 BE141481 BE141526 BE141516 BE141471 BE141478 BE141476 |
| | | BE141475 BE141021 BE141533 BE141464 BE141490 BE141472 BE141480 |
| 413485 | 1372953_1 | N52628 BE143639 BE143706 |
| 413508 | 1374273_1 | BE145364 BE145429 BE145418 |
| 413618 | 1380384_1 | BE154078 BE154006 BE153891 BE153523 BE153983 |
| 413707 | 1384137_1 | BE158679 BE158714 |
| 413743 | 1385884_1 | BE161004 BE162497 BE161135 BE160999 BE162492 |
| 413782 | 1389068_1 | BE546104 BE165710 BE382801 |
| 413792 | 1389912_1 | BE166924 BE166921 BE166925 BE166915 BE166970 BE166968 |
| 413804 | 1390710_1 | T64682 BE168190 BE168256 |
| 414091 | 141621_1 | T83742 AW672882 AA135378 |
| 414203 | 1425510_2 | BE262170 BE382553 BE261026 BE273627 |
| 414220 | 1426940_1 | BE298094 BE267860 |
| 414276 | 1432115_−1 | BE297862 |
| 414366 | 1438636_1 | BE549143 BE390613 BE277344 |
| 414833 | 1496271_1 | T07114 BE543688 |
| 414985 | 1511215_1 | C17372 D63180 D78908 D63262 |
| 415027 | 1515978_1 | D31010 D30991 D31168 D31166 D31465 |
| 415104 | 1522649_1 | D60076 D60259 D61037 |
| 415114 | 1523035_1 | D60468 D60950 D61218 N98936 |
| 415178 | 1527354_1 | D80503 D81739 N95691 |
| 415296 | 1533528_1 | F05086 F05091 R17158 |
| 415303 | 153360_1 | R11813 AA164376 T56632 |
| 415352 | 1534744_1 | F06565 Z43466 R18417 F06477 F06476 F07098 |
| 415364 | 1535008_1 | F06771 H04895 Z42778 |
| 415371 | 1535066_1 | R15239 Z45189 F06836 |
| 415392 | 1535746_1 | Z44067 F07617 R34555 |
| 415569 | 1539911_1 | Z43930 F12170 H10881 T65261 |
| 415572 | 1539951_1 | F12294 F12213 T66272 T66261 |
| 415600 | 1540373_1 | F12664 T74312 N80318 Z20039 |
| 415626 | 1540758_1 | Z43847 F13068 T75331 |
| 415635 | 1540853_1 | F13168 R21289 T77628 |
| 415750 | 155215_1 | AA167712 AW936024 AW364438 AW364446 |
| 415773 | 1554447_1 | R21651 H00542 |
| 415822 | 155791_1 | D59243 D63202 AA169716 |
| 415948 | 156264_1 | AA262226 AI984175 AA171807 |
| 416173 | 1574973_1 | R52782 R17313 H24192 R19876 |
| 416343 | 1589633_1 | H49213 W90725 H49398 W90726 |
| 416395 | 1592777_1 | R94575 T99886 H52989 |
| 416624 | 1604694_1 | H69044 T47567 H75691 T50292 |
| 417304 | 166556_1 | H15635 H16691 AA195506 |
| 417396 | 1674485_1 | T98987 T96744 N78306 |
| 417742 | 1696282_1 | R64719 Z44680 R12451 |
| 417974 | 171237_1 | AA210765 T95700 H94407 |
| 418297 | 1736343_1 | R91254 T97156 R58711 |
| 418454 | 175699_1 | AA315308 AA223392 BE538098 BE087173 |
| 418498 | 1762961_1 | T78248 T88763 R93361 |
| 418546 | 176677_1 | AA224827 T59708 T59843 BE156903 |
| 418573 | 176907_1 | AA225188 AL157508 AL157509 AA225189 |
| 418636 | 177402_1 | AW749855 AA225995 AW750208 AW750206 |
| 418712 | 1784125_1 | Z42183 T31621 T97478 |
| 418948 | 180808_1 | AI217097 AW886090 W38035 W38792 AA232835 AW936043 |
| 419059 | 1816038_1 | T86216 T86117 T83316 |
| 419145 | 182217_1 | N99638 AW973750 AA328271 H90994 AA558020 AA234435 N59599 R94815 |
| 419472 | 185148_1 | AW978038 AA804204 AA243400 |
| 419477 | 185172_1 | AA826279 AA243426 AW971614 AW967805 AW971605 |
| 419716 | 187390_1 | AA953770 AA249091 |
| 419805 | 188248_1 | AW966945 AA250984 H91733 AW966941 |
| 419807 | 188252_1 | R77402 AA262462 AA250988 R06794 |
| 419834 | 188386_1 | AA251139 AW967485 AA251204 |
| 419932 | 189159_1 | AA281594 AI365043 AA251996 |
| 419998 | 189768_1 | AA252691 AW298356 AA688063 |
| 420111 | 190755_1 | AA255652 AA280911 AW967920 AA262684 |
| 420270 | 192170_1 | AA257990 AW816460 AI416981 AW500873 |
| 420643 | 195293_1 | W87731 AA279004 AA279001 |
| 420928 | 197723_1 | AA281809 H89487 N46537 |
| 421280 | 200885_1 | AA811804 AA809404 AA286907 AW977624 |
| 421338 | 201378_1 | AA287443 AA419385 BE084078 AI478347 |
| 421381 | 201903_1 | AA361752 AW963276 AA288017 |
| 421418 | 202288_1 | AA806639 AA291008 AA836274 AW978806 |
| 421708 | 205732_1 | AW754341 AW858420 AW858475 AW861969 AW861925 AW858554 AW858616 AW858450 AW858545 |
| 421813 | 207654_1 | BE048255 AA313083 AA298419 |
| 422204 | 213258_1 | AA339015 AW962948 AA306188 |
| 422342 | 215498_1 | AA309272 AA309312 AW961837 |
| 422429 | 216469_1 | AA310527 AW962295 Z44865 H06641 |
| 422504 | 217160_1 | AA311407 AW958321 N23583 R70050 |
| 422588 | 218192_1 | AA312730 AW963285 W28250 W27318 |
| 422760 | 221034_1 | BE409561 BE162756 AW732798 |
| 422834 | 221906_1 | AA318334 AW961457 AA317752 |
| 423100 | 224988_1 | AA323114 AA321992 BE161391 BE161392 |
| 423121 | 225175_1 | AW864848 AA322213 AA322209 AW961624 |
| 423368 | 227560_1 | AA364195 AA325029 AW962050 |
| 423632 | 230430_1 | AA328824 AW961410 AW958096 |
| 423644 | 230585_1 | AA329048 AW962484 T83628 |
| 423818 | 232362_1 | AA332439 AA332579 AA331470 AW962539 |
| 423837 | 232478_1 | AW937063 AW937056 AW937062 AW937059 AW937057 AA331599 AW937061 AW937093 AW937094 AW937058 |
| | | AW851327 BE082872 AW752885 AW937055 AW937054 |
| 423912 | 233241_1 | BE091233 BE080904 BE079414 BE075356 AA332482 |
| 424353 | 238398_1 | AA339646 AA339189 AW966286 |
| 424589 | 241202_1 | AW854298 AA343691 H50917 H50907 H50938 |
| 424951 | 245273_1 | AW964082 AA348838 AA348839 |
| 424993 | 245782_1 | F07625 R35115 AW953115 F06102 H13351 AA349497 F11152 AA707254 |
| 425360 | 250631_1 | BE547704 AA355909 |
| 425362 | 250655_1 | AA355936 AI741379 |
| 425672 | 254716_1 | AA361483 AI557239 |
| 426356 | 265381_1 | BE536836 AA376153 |
| 426475 | 267785_1 | AL134728 AA379975 AA379440 AW963931 |
| 426561 | 269158_1 | AA381437 AA628833 AW407275 |
| 426603 | 269825_1 | AA382291 AA994657 |
| 427259 | 276594_1 | AA400096 AA400167 |
| 427566 | 280401_1 | AI743515 AA405617 AW276706 |
| 427980 | 285225_1 | AA418305 AI264351 |
| 428042 | 286292_1 | AA419529 H97089 H96977 |
| 428192 | 288021_1 | AA424051 AW104616 |
| 428337 | 289967_1 | AA644508 AA479489 AA426174 |
| 428436 | 291472_1 | BE080180 AW827313 AW231970 AA995028 AA428584 AW872716 AW892508 AW854593 AA578441 |
| | | AW975234 AA664937 AA984131 AA528743 AA552874 AA564758 AW063245 AI267534 AW070190 AW893483 AA770330 |
| | | AA906928 AA906582 AA758746 AA551717 AW063311 AA429538 |
| 429236 | 301580_1 | AA448407 AA448404 AA448424 AA448426 |
| 429917 | 31049_1 | H80572 AL109691 H80520 |
| 429979 | 311517_1 | AA463338 M86137 M85945 AI040226 |
| 430076 | 312952_1 | AA465115 AW967750 AW869525 |
| 430350 | 316401_1 | BE169639 AA476976 |
| 430561 | 319932_1 | BE065227 BE065366 BE065182 BE065184 AA481239 |
| 430640 | 321094_1 | AA482636 R16336 R16343 R60706 R53647 |
| 430795 | 323756_1 | AW971398 AA507162 AA486494 |
| 431319 | 331474_1 | AA873350 T82429 T82428 |
| 431322 | 331543_1 | AW970622 AA503009 AA502998 AA502989 AA502805 T92188 |
| 431670 | 336353_1 | AW971287 AA524976 AA513479 |
| 431828 | 338201_1 | AA572994 AA516249 AA702595 |
| 432093 | 341283_1 | H28383 AW972670 H28359 AA525808 |
| 432222 | 343347_1 | AI204995 AW827539 AW969908 AW440776 AA528756 |
| 432724 | 35330_1 | X98266 N41124 |
| 433005 | 357346_1 | AW939074 AW939073 BE160476 AW939938 AW939206 AW940012 AW939076 AA573577 AW750479 |
| | | AA574383 AW970057 |
| 433108 | 35896_1 | AB002446 T03146 |
| 433129 | 359479_1 | AA577814 N68543 N68478 H79613 AI910764 |
| 433171 | 360292_1 | AA579425 AW969965 AA579102 |
| 433311 | 362908_1 | AA688149 AW975336 R82513 R79237 |
| 433371 | 364430_1 | T25451 AA585296 AA585305 |
| 433440 | 36629_−1 | AF052127 |
| 433586 | 370470_1 | T85301 AW517087 AA601054 BE073959 |
| 433782 | 37414_1 | AF090945 AW996754 AI064870 |
| 434006 | 37855_1 | AF113688 AI114617 |
| 434092 | 379978_1 | AA625155 BE502124 |
| 434138 | 380572_1 | AA625804 AW418787 AW074833 AI675642 AI393368 |
| 434280 | 382816_1 | BE005398 AA628622 AA994155 |
| 435382 | 405265_1 | N54493 AA679039 N76605 |
| 436023 | 413562_1 | T81819 AW393709 AA703541 AW370185 |
| 436359 | 41847_1 | Z83806 AJ132091 AJ132090 |
| 436383 | 41888_1 | BE065178 AJ227879 |
| 436740 | 426095_1 | AW975133 AA729943 AA805813 |
| 436884 | 428731_1 | BE046657 AA736610 AW827495 |
| 437087 | 432797_1 | AA745563 AA745334 AA744168 AA744044 AA744034 AA744056 AA745569 AA744397 |
| 437146 | 43371_1 | AA730977 AI261584 AA334473 Z43283 AW875861 AW938044 BE150701 AW936262 AA306862 |
| | | BE565575 BE567380 AA728920 AA167612 AI239729 AI251752 AA485791 BE568425 AW962958 |
| 437214 | 434730_1 | BE092336 BE092259 BE092497 BE092051 AA746882 AI336378 |
| 437240 | 435139_1 | AA747537 BE089068 BE089070 |
| 437251 | 435242_1 | AW976082 AW976085 AA747803 AA747680 |
| 437274 | 435465_1 | AA747965 AI248281 AI752458 |
| 437324 | 43609_1 | AI162077 AW023677 |
| 437471 | 43747_1 | AL390169 AW277196 AW131001 |
| 437798 | 443128_1 | AW811767 AA831890 AW977539 AA768655 |
| 437854 | 44418_1 | AL119723 AL119874 AI909018 U50537 |
| 437938 | 44573_2 | AI950087 N70208 R97040 N36809 AI308119 AW967677 N35320 AI251473 H59397 AW971573 R97278 W01059 |
| | | AW967671 AA908598 AA251875 AI820501 AI820532 W87891 T85904 U71456 T82391 BE328571 T75102 R34725 |
| | | AA884922 BE328517 AI219788 AA884444 N92578 F13493 AA927794 AI560251 AW874068 AL134043 AW235363 |
| | | AA663345 AW008282 AA488964 AA283144 AI890387 AI950344 AI741346 AI689062 AA282915 AW102898 AI872193 |
| | | AI763273 AW173586 AW150329 AI653832 AI762688 AA988777 AA488892 AI356394 AW103813 AI539642 AA642789 |
| | | AA856975 AW505512 AI961530 AW629970 BE612881 AW276997 AW513601 AW512843 AA044209 AW856538 |
| | | AA180009 AA337499 AW961101 AA251669 AA251874 AI819225 AW205862 AI683338 AI858509 AW276905 AI633006 |
| | | AA972584 AA908741 AW072629 AW513996 AA293273 AA969759 N75628 N22388 H84729 H60052 T92487 AI022058 |
| | | AA780419 AA551005 W80701 AW613456 AI373032 AI564269 F00531 H83488 W37181 W78802 R66056 AI002839 |
| | | R67840 AA300207 AW959581 T63226 F04005 |
| 438316 | 454745_1 | AA789249 AA904217 AA904142 |
| 438366 | 456119_1 | AA805760 BE000856 |
| 438390 | 45662_1 | AI422017 AI422945 AI363249 AI423113 AI925592 AI420795 AI208187 AI423279 AI423645 AI424090 AI359637 |
| | | AI044732 D17003 |
| 438739 | 464193_1 | AA815391 AW573185 |
| 438990 | 46760_1 | AF085890 H29949 H29856 |
| 439183 | 46956_1 | AW970600 AA503323 H89218 AF086031 H89112 |
| 439330 | 47119_1 | AF086147 W20068 N91464 |
| 439550 | 473671_1 | H10438 AA837479 H16299 AW978825 |
| 439780 | 47673_1 | AL109688 R23665 R26578 |
| 440012 | 483290_1 | AA861072 H02819 R25946 |
| 440635 | 498968_1 | AW610331 AW610338 AA897379 |
| 442048 | 531432_1 | AA974603 AI984319 AW340495 |
| 442518 | 544159_1 | AF150226 AI240137 |
| 444163 | 593658_1 | AI126098 AI184746 AI148521 |
| 444282 | 599268_1 | AI138955 BE149059 BE149027 |
| 444584 | 611496_1 | AI168422 D80113 T59074 |
| 444646 | 613548_1 | AI184565 AL037304 AW793549 |
| 445396 | 638138_1 | BE181792 AI222266 BE181789 BE181837 |
| 445832 | 651925_1 | AI261545 N59134 AW875371 AW875247 |
| 446119 | 662531_1 | D29527 AI275850 |
| 446312 | 671114_1 | BE087853 AI286184 |
| 446922 | 69865_1 | BE175605 Z43529 F06610 BE175602 AV661027 |
| 447258 | 71439_1 | BE047911 AA984167 BE617316 |
| 447376 | 719483_−1 | AI376747 |
| 447522 | 724922_1 | BE143888 AI382949 T06429 |
| 448632 | 77303_−1 | BE614269 |
| 448643 | 773566_−1 | AI557531 |
| 448778 | 7800_1 | AF074913 AW505435 U62539 |
| 448871 | 78566_2 | BE616709 BE616712 |
| 449213 | 80240_−1 | BE616861 |
| 449231 | 80303_1 | BE410360 AA442408 AA315540 |
| 449344 | 805184_1 | AI640355 BE464385 AW197679 |
| 449666 | 81249_1 | AA002047 N72537 H54142 H81580 |
| 449901 | 818599_1 | AI674072 BE268487 |
| 450257 | 830121_1 | AW820313 BE065936 BE065948 BE155658 AI689473 AW862275 AW820265 AW820438 AW820331 |
| 450573 | 83907_1 | AW964334 AW967230 T08913 R11895 F11463 AA010271 |
| 450625 | 84032_1 | AW970107 AA513951 AA010406 |
| 450870 | 84994_1 | AA011471 AA700636 |
| 450928 | 851593_1 | AI744417 R91614 H77365 |
| 451283 | 86479_1 | H83979 R84433 AA017024 |
| 451359 | 86711_1 | H85334 AA017286 H86654 |
| 451365 | 867325_−1 | AI791783 |
| 451373 | 867533_1 | AI792030 AW386116 AW875146 |
| 451487 | 87131_1 | AA018072 N46370 R84847 |
| 451495 | 87182_1 | H86887 H86898 H86906 AA019519 AA018127 AA056306 AA053726 |
| 451535 | 87353_1 | AW970577 AA861861 AA418358 AA018329 AA501885 |
| 451724 | 882130_1 | AI903765 AI811194 BE007147 AW130760 |
| 451844 | 888230_1 | T61430 AI820546 AI821336 |
| 452163 | 902067_1 | AI863140 W80703 R43474 |
| 452453 | 918300_1 | AI902519 AI902518 AI902516 |
| 452457 | 918409_1 | AW062499 AW062495 AW062500 AW062492 AW062494 AW062493 AW062496 AW062498 AI902650 AI902649 |
| 452519 | 920292_1 | BE006701 BE006709 BE006704 AI904981 |
| 452530 | 920646_1 | AI905518 AI905516 AI905457 AI905515 AW176013 AW176037 |
| 452536 | 921149_1 | BE063380 BE063346 AI906097 |
| 452550 | 92188_1 | AA026735 BE264405 AL040323 AA323099 |
| 452560 | 922216_1 | BE077084 AW139963 AW863127 AW806209 AW806204 AW806205 AW806206 AW806211 AW806212 |
| | | AW806207 AW806208 AW806210 AI907497 |
| 452738 | 929698_1 | AL133800 AI916209 |
| 452825 | 933090_1 | AI921523 AW903707 AW903687 |
| 453472 | 968371_1 | AL037925 AL037931 AL037957 |
| 453677 | 977149_1 | AL079389 AL079390 |
| 453725 | 978760_1 | W28543 AL119531 |
| 453846 | 983043_1 | AL157586 AL157590 |
| 454044 | 996486_1 | AW022393 AW022578 |
| 454049 | 996858_1 | AW022885 AW023064 |
| 454099 | 1007650_1 | AW062974 AW859625 BE081366 |
| 454314 | 1108161_1 | AW364844 AW364847 AW937534 AW937593 AW937659 |
| 454327 | 1114097_1 | BE064097 BE064124 BE064087 AW371617 |
| 454331 | 1115278_1 | AW372937 AW378043 AW377970 BE145850 AW377858 AW377964 AW378040 |
| 454380 | 1152648_−1 | AW858722 |
| 454471 | 1213795_1 | AW902125 AW792853 AW837703 AW837710 |
| 454524 | 1221640_1 | AW857191 AW857192 AW804060 |
| 454554 | 1223842_1 | AW847505 AW811792 BE061442 BE061433 AW847506 AW806999 AW806996 BE061436 BE061430 BE142460 BE146499 |
| | | AW806994 AW809156 AW806991 AW814082 AW806992 BE061669 AW807002 BE146659 AW806995 AW807000 |
| | | AW845743 AW845747 AW847504 BE142458 BE061431 BE061435 AW847507 BE146650 BE142470 AW814096 |
| | | AW807012 BE061438 AW807011 AW806993 BE142465 BE142459 BE142462 AW854330 AW854331 BE061434 |
| | | BE061731 BE142464 AW847501 AW807001 BE142463 AW811800 BE061437 AW811802 BE061440 |
| | | AW806997 AW806998 BE061745 BE061753 |
| 454592 | 1226050_1 | AW810112 AW810114 AW810032 AW809631 AW810183 AW810178 |
| 454622 | 1226951_1 | U70071 AW883715 AW810701 |
| 454637 | 1227707_1 | AW811613 AW811611 AW811610 |
| 454648 | 1227976_1 | AW811960 AW811957 AW811959 |
| 454687 | 1229077_1 | AW814473 AW816157 AW816064 AW813298 AW813315 AW816100 AW813389 AW813338 AW813342 |
| | | AW816108 AW813318 AW816105 AW816160 AW816163 AW814480 AW813392 AW816063 AW813399 |
| 454692 | 1229118_1 | AW813350 AW816082 AW813476 AW813383 |
| 454702 | 1229722_1 | BE145915 BE145893 AW892892 BE145806 BE145901 AW814144 |
| 454729 | 1231926_1 | AW817003 AW816997 AW817126 AW817331 AW817120 BE158378 AW817121 |
| 454750 | 1233434_1 | AW866285 AW819000 AW819153 AW819014 AW866541 |
| 454775 | 1234106_1 | BE160229 AW819879 AW820179 AW819882 AW819876 AW820169 BE153201 AW993736 BE152911 |
| 454789 | 1234742_1 | BE156314 BE156316 AW820750 |
| 454790 | 1234752_1 | AW820852 AW820773 AW821088 |
| 454797 | 1235093_1 | BE161168 BE162466 AW821260 |
| 454851 | 1237414_1 | AW835127 BE071463 AW991660 BE071473 BE071461 BE071469 BE071472 |
| 454863 | 1237794_1 | AW835610 AW835806 |
| 454893 | 1239472_1 | AW837753 AW837754 AW837700 |
| 454898 | 1239833_1 | AW838125 AW838205 |
| 454951 | 1246612_1 | AW847464 AW847462 BE063767 BE063755 |
| 454956 | 1246711_1 | AW847725 AW847599 AW847600 AW847706 AW847854 AW847595 AW847850 AW847795 AW847798 |
| 455040 | 1250028_1 | AW852286 AW851934 AW852096 AW852274 |
| 455047 | 1250536_1 | AW852530 AW852527 AW852526 |
| 455073 | 1252361_1 | AW854829 AW854805 AW854841 AW854825 AW854822 AW854830 AW854835 AW854826 |
| 455128 | 1254554_1 | AW861555 AW857776 AW861556 AW861567 AW857799 AW857768 |
| 455170 | 1256906_1 | AW860972 AW862598 AW862599 AW860988 AW860983 AW860898 AW860925 AW860922 AW860986 AW860984 |
| | | AW860989 |
| 455201 | 1259748_1 | AW947884 AW947918 AW947888 AW947883 AW947897 AW947910 AW947905 AW864751 AW947878 |
| 455207 | 1260400_1 | AW994394 AW865900 AW865905 AW865891 AW866014 AW865898 |
| 455225 | 1262318_1 | AW996689 AW996380 AW996453 BE085650 AW868687 BE085595 |
| 455235 | 1265634_1 | AW875951 AW875950 AW875936 AW875948 AW875939 AW875957 |
| 455267 | 1269025_1 | AW880861 AW880883 AW881117 AW881012 |
| 455331 | 1280616_1 | AW897292 AW897251 AW897298 AW897248 AW897259 AW897250 AW897246 AW897242 |
| 455350 | 1283853_1 | AW901809 AW901787 AW901795 AW901792 AW901744 AW901753 AW901807 AW901798 |
| 455351 | 1284023_1 | AW901942 AW901937 AW902016 AW901947 |
| 455380 | 1287679_1 | BE160188 AW935785 BE160401 BE160319 BE160313 BE160395 |
| 455414 | 1288605_1 | AW936969 AW936920 AW936975 AW936906 |
| 455428 | 1289639_1 | AW938204 AW938195 AW938205 AW938206 AW938193 AW938199 AW938200 AW938190 AW938201 |
| | | AW938198 AW938203 AW938202 AW938192 AW938207 AW938194 |
| 455511 | 1321229_1 | BE144762 AW979091 |
| 455573 | 1332529_1 | BE004988 BE004574 |
| 455586 | 1334857_1 | BE070794 BE070791 BE070792 BE070795 BE070789 BE070788 BE070786 BE070787 BE070790 |
| 455595 | 1335422_1 | BE008343 BE008321 BE008326 BE008314 BE008345 BE008330 BE008344 BE008327 |
| 455610 | 1337549_1 | BE011703 BE011692 BE011697 BE011624 BE011673 BE011644 |
| 455647 | 1348563_1 | BE064415 BE064430 BE064448 |
| 455650 | 1348720_1 | BE064655 BE153953 |
| 455657 | 1349078_1 | BE065209 BE065364 BE065110 BE065111 |
| 455669 | 1349554_1 | BE065803 BE065826 |
| 455678 | 1349716_1 | BE066007 BE066017 BE066074 |
| 455761 | 1359566_1 | BE080895 BE080906 |
| 455831 | 1373969_1 | BE144966 BE144957 BE144958 |
| 455874 | 1379514_1 | BE152283 BE152260 BE152297 BE152292 BE152259 BE152250 |
| 455880 | 1380022_1 | BE153208 BE153146 BE152981 |
| 455903 | 1381603_1 | BE155185 BE155264 BE155186 |
| 455938 | 1384537_1 | BE159432 BE159313 BE159295 BE159242 |
| 455950 | 1385884_1 | BE161004 BE162497 BE161135 BE160999 BE162492 |
| 455951 | 1385886_1 | BE161001 BE162494 BE162470 BE161172 |
| 455965 | 1389984_1 | BE167014 BE167058 BE167062 |
| 455981 | 1396805_1 | BE177000 BE177003 BE176816 BE176952 |
| 456034 | 142696_1 | AW450979 AA136653 AA136656 AW419381 AA984358 AA492073 BE168945 AA809054 AW238038 BE011212 |
| | | BE011359 BE011367 BE011368 BE011362 BE011215 BE011365 BE011363 |
| 456122 | 153360_1 | R11813 AA164376 T56632 |
| 456212 | 1655565_1 | N51636 T51874 T51829 |
| 456235 | 168686_1 | AA203637 AA832266 H67452 |
| 456493 | 193331_1 | AA261830 AW967855 H26953 AA262478 |
| 456592 | 202684_1 | R91600 T87079 AA291455 |
| 456800 | 233842_1 | AL118754 AA333202 H38001 |
| 457340 | 322100_1 | AA492071 AA484229 AW969850 |
| 457427 | 336353_1 | AW971287 AA524976 AA513479 |
| 457437 | 337879_1 | AW969732 AW970974 AA515741 |
| 457474 | 341077_1 | AW972935 AA525272 N28227 |
| 457625 | 373012_1 | T10073 H14872 AA604786 |
| 457892 | 432926_1 | AA744389 AA744270 AA744284 AA744299 AA745380 AA744337 AA846905 AA847698 |
| 458080 | 471050_1 | BE142728 AA834047 AW937124 |
| 458172 | 497769_1 | BE007237 BE007496 BE007263 W19919 BE546311 AA984819 |
| 458781 | 743159_1 | AI444821 W26012 |
| 458841 | 784186_1 | W28965 W28971 |
| 458880 | 80785_1 | AA046742 AA551269 AA001505 |
| 459028 | 868710_1 | AI940577 AI940580 AI940568 AI940578 AI940569 AI795858 AI795867 AI940572 |
| 459128 | 918011_1 | AI902169 AI902173 AI902323 AI902174 AI902347 |
| 459182 | 922744_1 | BE178517 AI908132 BE142437 |

Pkey: Unique Eos probeset identifier number
CAT number: Gene cluster number
Accession: Genbank accession numbers

[0363] TABLE 1C

| Pkey | Ref | Strand | Nt_position |
|---|---|---|---|
| 400471 | 9931670 | Minus | 105629-105760 |
| 400495 | 9714773 | Minus | 61902-62137 |
| 400528 | 6981824 | Plus | 472381-472528, 474170-474277, 475328-475542, 475878-476000 |
| 400577 | 7960401 | Plus | 101535-101881 |
| 400608 | 9887666 | Minus | 96756-97558 |
| 400641 | 8117693 | Plus | 4786-4992 |
| 400644 | 8117693 | Plus | 27682-27840 |
| 400666 | 8118496 | Plus | 17982-18115, 20297-20456 |
| 400749 | 7331445 | Minus | 9162-9293 |
| 400750 | 8119067 | Plus | 198991-199168, 199316-199548 |
| 400751 | 7331445 | Minus | 35395-35533 |
| 400761 | 8131609 | Minus | 114220-115164 |
| 400762 | 8131616 | Plus | 7235-7605 |
| 400773 | 8131629 | Minus | 44116-44238, 48208-48321 |
| 400843 | 9188605 | Plus | 5863-5970, 7653-7784, 8892-9023, 9673-9807, 10634-10789, 15254-15403, 23827-23958 |
| 400844 | 9188605 | Plus | 24746-24872, 25035-25204 |
| 400845 | 9188605 | Plus | 34428-34612 |
| 400846 | 9188605 | Plus | 39310-39474 |
| 400860 | 9757499 | Minus | 151830-152104, 152649-152744 |
| 400880 | 9931121 | Plus | 29235-29336, 36363-36580 |
| 400887 | 9958187 | Plus | 119239-121542 |
| 400888 | 9958187 | Minus | 199600-199875 |
| 400937 | 7652890 | Minus | 89519-89905 |
| 400977 | 8072510 | Plus | 73950-74364 |
| 401002 | 8117251 | Minus | 77898-78050 |
| 401024 | 8117489 | Plus | 60551-60802 |
| 401045 | 8117619 | Plus | 90044-90184, 91111-91345 |
| 401048 | 7232177 | Plus | 132430-132761 |
| 401049 | 7232177 | Plus | 149157-150692 |
| 401086 | 9957912 | Plus | 84561-84884 |
| 401093 | 8516137 | Minus | 22335-23166 |
| 401101 | 8568122 | Plus | 77081-77226 |
| 401192 | 9719502 | Minus | 69559-70101 |
| 401197 | 9719705 | Plus | 176341-176452 |
| 401203 | 9743387 | Minus | 172961-173056, 173868-173928 |
| 401205 | 9743388 | Plus | 167373-167433, 167936-168031 |
| 401256 | 9796573 | Minus | 45482-45620 |
| 401262 | 9796963 | Plus | 35662-35799 |
| 401271 | 9797373 | Minus | 61292-61911 |
| 401276 | 8954274 | Minus | 15919-16096 |
| 401279 | 9800062 | Minus | 13535-13669 |
| 401342 | 9908882 | Plus | 3096-3242 |
| 401365 | 9796180 | Minus | 119572-119672 |
| 401395 | 7327842 | Minus | 11502-11771, 46357-46489, 58720-58916 |
| 401420 | 7452889 | Minus | 141362-141502 |
| 401439 | 8246737 | Plus | 92993-94026 |
| 401451 | 6634068 | Minus | 119926-121272 |
| 401508 | 7534110 | Minus | 110779-110983 |
| 401519 | 6649315 | Plus | 157315-157950 |
| 401537 | 7960358 | Minus | 186786-187029, 190607-190779, 198218-198348 |
| 401561 | 8224660 | Minus | 10652-10838, 19815-20018 |
| 401566 | 8469090 | Minus | 96277-96420, 96979-97160 |
| 401604 | 7689963 | Minus | 119835-120185 |
| 401619 | 8516761 | Minus | 141309-143576 |
| 401669 | 9801805 | Plus | 25414-26310 |
| 401691 | 3582311 | Plus | 162333-162715 |
| 401694 | 3540172 | Minus | 64056-64168 |
| 401747 | 9789672 | Minus | 118596-118816, 119119-119244, 119609-119761, 120422-120990, 130161-130381, 130468-130593, |
| | | | 131097-131258, 131866-131932, 132451-132575, 133580-134011 |
| 401759 | 9929699 | Plus | 59811-60665 |
| 401780 | 7249190 | Minus | 28397-28617, 28920-29045, 29135-29296, 29411-29567, 29705-29787, 30224-30573 |
| 401866 | 8018106 | Plus | 73126-73623 |
| 401905 | 8671966 | Plus | 153965-154441, 156599-156819 |
| 401994 | 4153858 | Minus | 42904-43124, 43211-43336, 44607-44763, 45199-45281, 46337-46732 |
| 402001 | 9501818 | Plus | 68052-68223 |
| 402075 | 8117407 | Plus | 121907-122035, 122804-122921, 124019-124161, 124455-124610, 125672-126076 |
| 402076 | 8117410 | Plus | 128316-128627 |
| 402089 | 7249154 | Plus | 101610-101819 |
| 402110 | 8131678 | Minus | 173889-174062 |
| 402176 | 7543687 | Minus | 10-750 |
| 402230 | 9966312 | Minus | 29782-29932 |
| 402245 | 7690231 | Minus | 88253-88417 |
| 402296 | 6598824 | Plus | 22587-23723 |
| 402325 | 7636348 | Minus | 60658-60738, 61677-61803 |
| 402407 | 3962498 | Minus | 115812-116187 |
| 402408 | 9796239 | Minus | 110326-110491 |
| 402430 | 9796372 | Minus | 62382-62552 |
| 402435 | 9796462 | Plus | 114593-115588 |
| 402472 | 9797116 | Plus | 53716-54470 |
| 402474 | 7547175 | Minus | 53526-53628, 55755-55920, 57530-57757 |
| 402480 | 9797375 | Plus | 59708-59999 |
| 402490 | 9797648 | Plus | 149982-150929 |
| 402522 | 9798493 | Plus | 20605-20731 |
| 402530 | 7630937 | Minus | 1524-2003 |
| 402546 | 7637348 | Plus | 24673-25170 |
| 402553 | 9863566 | Plus | 48292-48398, 49564-49944 |
| 402604 | 9909420 | Plus | 20393-20767 |
| 402716 | 8969253 | Minus | 84065-84242 |
| 402727 | 9211324 | Plus | 54596-54777 |
| 402812 | 6010110 | Plus | 25026-25091, 25844-25920 |
| 402820 | 6456853 | Minus | 82274-82443 |
| 402846 | 9408716 | Minus | 5726-5850 |
| 402889 | 9931133 | Plus | 89392-89498, 90358-90571 |
| 402892 | 8086844 | Minus | 194384-194645 |
| 402901 | 8894222 | Minus | 175426-175667 |
| 402922 | 8216969 | Minus | 19036-19401, 19589-19849, 19951-20102 |
| 402938 | 8953442 | Plus | 22365-22473 |
| 402995 | 2996643 | Minus | 5962-6216 |
| 403005 | 5791501 | Minus | 16945-17053, 20018-20403 |
| 403020 | 6984114 | Minus | 96644-97021, 97462-97868 |
| 403029 | 7768593 | Minus | 44558-44766 |
| 403047 | 3540153 | Minus | 59793-59968 |
| 403073 | 8954241 | Plus | 142964-143260 |
| 403085 | 8954241 | Plus | 165035-165334, 165420-165713 |
| 403092 | 8954241 | Plus | 174720-175016, 175104-175406, 175508-175813 |
| 403106 | 7331404 | Plus | 77162-77350, 81338-81511 |
| 403172 | 7464784 | Minus | 64007-64275 |
| 403212 | 7630897 | Minus | 156037-156210 |
| 403214 | 7630945 | Minus | 76723-77027, 79317-79484 |
| 403277 | 8072597 | Minus | 27494-27642 |
| 403331 | 8567936 | Plus | 169793-169966 |
| 403344 | 8569726 | Plus | 70823-70990 |
| 403362 | 8571772 | Plus | 64099-64260 |
| 403381 | 9438267 | Minus | 26009-26178 |
| 403426 | 9719529 | Minus | 157156-158183 |
| 403485 | 9966528 | Plus | 2888-3001, 3198-3532, 3655-4117 |
| 403567 | 8101141 | Plus | 35349-35614 |
| 403588 | 8101227 | Minus | 197672-197944 |
| 403590 | 8101229 | Plus | 405-1296 |
| 403615 | 8567964 | Plus | 107671-107866 |
| 403687 | 7387384 | Plus | 9009-9534 |
| 403754 | 7229815 | Minus | 163899-164726 |
| 403776 | 7770611 | Minus | 1414-1513, 1624-1756 |
| 403822 | 9369510 | Minus | 142803-142922 |
| 403851 | 7708872 | Plus | 22733-23007 |
| 403860 | 7708960 | Minus | 95755-96045 |
| 403894 | 7381715 | Minus | 1442-2224 |
| 403903 | 7710671 | Minus | 101165-102597 |
| 403959 | 8224399 | Minus | 175363-177474 |
| 404015 | 8655948 | Minus | 587821-588222 |
| 404059 | 3548785 | Plus | 104326-106788 |
| 404113 | 9588571 | Minus | 13446-13646 |
| 404148 | 9863703 | Plus | 78218-78418, 79571-79709 |
| 404152 | 9884757 | Plus | 41111-41281, 45495-45716, 47801-47910 |
| 404156 | 9886577 | Plus | 127319-127754 |
| 404229 | 7159766 | Plus | 16607-16841 |
| 404232 | 8218045 | Minus | 71800-71956 |
| 404268 | 9711362 | Plus | 33238-33463 |
| 404274 | 9885189 | Plus | 104127-104318 |
| 404288 | 2769644 | Plus | 3512-3691 |
| 404290 | 2769644 | Plus | 36651-36813 |
| 404336 | 9838028 | Plus | 157951-158129 |
| 404403 | 7272157 | Minus | 72053-72238 |
| 404440 | 7528051 | Plus | 80430-81581 |
| 404488 | 8113286 | Minus | 64835-64994 |
| 404498 | 8151654 | Plus | 13292-13497 |
| 404507 | 8151803 | Plus | 146359-146739 |
| 404516 | 8151967 | Plus | 114153-114322 |
| 404538 | 8247909 | Minus | 192748-192945 |
| 404594 | 9958262 | Minus | 15310-15510 |
| 404639 | 9796778 | Plus | 5779-14387 |
| 404653 | 9796999 | Plus | 164997-165230 |
| 404676 | 9797204 | Minus | 56167-56342, 58066-58189, 58891-59048, 60452-60628 |
| 404684 | 9797403 | Minus | 110881-111020 |
| 404685 | 9797437 | Minus | 153217-153315, 154043-154124, 159185-159353, 161290-161420, 163544-163669, 166127-166207, 167654-167734 |
| 404704 | 9800728 | Minus | 88841-89018 |
| 404819 | 4678240 | Plus | 16223-16319, 16427-16513, 16736-16859, 16941-17075, 17170-17287, 17389-17529, 18261-18357, 18443-18578 |
| 404829 | 6624702 | Minus | 4913-5093, 7310-7469, 9472-9621, 9951-10082 |
| 404860 | 8979555 | Plus | 65852-66081 |
| 404874 | 9650523 | Minus | 96066-96192 |
| 404881 | 5931510 | Minus | 36360-36608 |
| 404894 | 6850447 | Plus | 102822-103127 |
| 404939 | 6862697 | Plus | 175318-175476 |
| 404977 | 3738341 | Minus | 43081-43229 |
| 405033 | 7107731 | Minus | 142358-142546 |
| 405059 | 7656683 | Plus | 349-822 |
| 405064 | 7658416 | Plus | 81207-81416 |
| 405071 | 7708797 | Minus | 11115-11552 |
| 405102 | 8076881 | Minus | 120922-121296 |
| 405167 | 9966316 | Plus | 43796-43981, 48245-48427, 54141-54317 |
| 405170 | 9966524 | Plus | 37047-37198 |
| 405177 | 7139696 | Minus | 118466-118663 |
| 405186 | 7229793 | Plus | 161475-161581, 162930-163067 |
| 405258 | 7329310 | Plus | 129930-130076 |
| 405281 | 6139075 | Minus | 34202-34351, 35194-35336, 45412-45475, 45731-45958, 47296-47457, 49549-49658, 49790-49904, |
| | | | 50231-50342, 53583-53667, 54111-54279 |
| 405308 | 3638954 | Plus | 40778-41034, 41383-41573 |
| 405349 | 2914717 | Minus | 85552-85806 |
| 405379 | 6513908 | Minus | 22332-22473, 24333-24439 |
| 405390 | 6606064 | Minus | 94007-94177 |
| 405411 | 3451356 | Minus | 17503-17778, 18021-18290 |
| 405463 | 7715630 | Minus | 123097-123260 |
| 405494 | 8050952 | Minus | 70284-70518 |
| 405520 | 9454643 | Plus | 60849-60981 |
| 405526 | 9558556 | Minus | 132704-133277 |
| 405580 | 4512267 | Plus | 169232-169647 |
| 405600 | 5923640 | Plus | 26662-27225 |
| 405654 | 4895155 | Minus | 53624-53759 |
| 405720 | 9797144 | Plus | 13409-13861 |
| 405725 | 9838299 | Minus | 106417-106521 |
| 405735 | 9931101 | Minus | 29854-29976 |
| 405738 | 9943998 | Plus | 44370-45410 |
| 405809 | 5304920 | Minus | 6655-6883, 8687-8859 |
| 405838 | 5686575 | Plus | 3460-3717 |
| 405863 | 7657810 | Plus | 49410-49620 |
| 405867 | 6758731 | Minus | 74553-75173 |
| 405906 | 7705124 | Minus | 10835-11059 |
| 405920 | 6758795 | Plus | 120621-120971 |
| 405968 | 8247789 | Plus | 14893-15148 |
| 406017 | 8272661 | Minus | 46271-46874 |
| 406036 | 6758919 | Plus | 17942-18163 |
| 406081 | 9123861 | Minus | 38115-38691 |
| 406137 | 9166422 | Minus | 30487-31058 |
| 406187 | 7289992 | Plus | 8044-8877 |
| 406243 | 7417725 | Plus | 38899-39369 |
| 406270 | 7534217 | Plus | 13136-13591 |
| 406320 | 9211754 | Minus | 20170-20511 |
| 406322 | 9212102 | Minus | 130230-130418 |
| 406360 | 9256107 | Minus | 7513-7673 |
| 406367 | 9256126 | Minus | 58313-58489 |
| 406397 | 9256243 | Minus | 127317-127454 |
| 406399 | 9256288 | Minus | 63448-63554 |
| 406434 | 9256651 | Minus | 17803-17931 |
| 406467 | 9795551 | Plus | 182212-182958 |
| 406471 | 9795566 | Plus | 87383-87589 |
| 406475 | 9797684 | Plus | 125417-125563, 128052-128180 |
| 406485 | 7711305 | Plus | 125036-125422 |
| 406511 | 7711412 | Plus | 177277-177384 |
| 406588 | 8189273 | Minus | 135629-135848 |

Pkey: Unique number corresponding to an Eos probeset
Ref: Sequence source. The 7 digit numbers in this column are Genbank Identifier (GI) numbers. “Dunham I. et al.” refers to the publication entitled “The DNA sequence of human chromosome 22.” Dunham I. et al., Nature (1999) 402: 489-495.
Strand: Indicates DNA strand from which exons were predicted.
Nt position: Indicates nucleotide positions of predicted exons.

[0364] TABLE 2A
485 GENES UP-REGULATED IN BLADDER CANCER

| Pkey | ExAccn | UnigeneID | Unigene Title | R1 |
|---|---|---|---|---|
| 418818 | AA228899 | Hs.101307 | Homo sapiens HUT11 protein mRNA, partial | 3.473 |
| 412841 | AI751157 | Hs.101395 | hypothetical protein MGC11352 | 2.279 |
| 421066 | AU076725 | Hs.101408 | branched chain aminotransferase 2, mitoc | 3.052 |
| 435136 | R27299 | Hs.10172 | ESTs | 4.717 |
| 444042 | NM_004915 | Hs.10237 | ATP-binding cassette, sub-family G (WHIT | 0.003 |
| 421307 | BE539976 | Hs.103305 | Homo sapiens mRNA; cDNA DKFZp434B0425 (f | 188.231 |
| 421318 | U63973 | Hs.103501 | rhodopsin kinase | 1.381 |
| 421359 | AK001589 | Hs.103816 | hypothetical protein FLJ10727 | 1.000 |
| 459462 | AA481396 | Hs.105167 | ESTs | 1.000 |
| 430134 | BE380149 | Hs.105223 | ESTs, Weakly similar to T33188 hypotheti | 1.000 |
| 433227 | AB040923 | Hs.106808 | kelch (Drosophila)-like 1 | 1.000 |
| 421742 | AW970004 | Hs.107528 | androgen induced protein | 1.514 |
| 417366 | BE185289 | Hs.1076 | small proline-rich protein 1B (cornifin) | 2.782 |
| 444342 | NM_014398 | Hs.10887 | similar to lysosome-associated membrane | 20.064 |
| 451686 | AA059246 | Hs.110293 | ESTs | 0.033 |
| 454417 | AI244459 | Hs.110826 | trinucleotide repeat containing 9 | 56.751 |
| 458760 | AI498631 | Hs.111334 | ferritin, light polypeptide | 2.512 |
| 422119 | AI277829 | Hs.111862 | KIAA0590 gene product | 2.634 |
| 422170 | AI791949 | Hs.112432 | anti-Mullerian hormone | 0.055 |
| 441877 | AW273802 | Hs.11340 | hypothetical protein FLJ23047 | 0.008 |
| 445958 | BE326257 | Hs.114536 | ESTs | 0.002 |
| 434288 | AW189075 | Hs.116265 | fibrillin3 | 11.401 |
| 435347 | AW014873 | Hs.116963 | ESTs | 0.003 |
| 453134 | AA032211 | Hs.118493 | ESTs | 262.962 |
| 444781 | NM_014400 | Hs.11950 | GPI-anchored metastasis-associated prote | 5.336 |
| 436154 | AA764950 | Hs.119898 | ESTs | 103.154 |
| 436246 | AW450963 | Hs.119991 | ESTs | 0.071 |
| 436293 | AI601188 | Hs.120910 | ESTs | 29.129 |
| 433078 | AW015188 | Hs.121575 | Homo sapiens cDNA FLJ12231 fis, clone MA | 274.769 |
| 438181 | AW978608 | Hs.122121 | ESTs, Weakly similar to I38022 hypotheti | 0.024 |
| 449399 | AA760881 | Hs.122408 | ESTs | 1.000 |
| 437722 | AW292947 | Hs.122872 | ESTs, Weakly similar to JU0033 hypotheti | 4.314 |
| 457465 | AW301344 | Hs.122908 | DNA replication factor | 0.264 |
| 409757 | NM_001898 | Hs.123114 | cystatin SN | 1.390 |
| 439907 | AA853978 | Hs.124577 | ESTs | 0.010 |
| 437181 | AI306615 | Hs.125343 | ESTs, Weakly similar to KIAA0758 protein | 0.344 |
| 440304 | BE159984 | Hs.125395 | ESTs | 0.025 |
| 423248 | AA380177 | Hs.125845 | ribulose-5-phosphate-3-epimerase | 0.014 |
| 441495 | AW294603 | Hs.127039 | ESTs | 0.198 |
| 435376 | AW770956 | Hs.127280 | ESTs | 0.008 |
| 427685 | AI751124 | Hs.127311 | ESTs | 3.244 |
| 423349 | AF010258 | Hs.127428 | homeo box A9 | 0.134 |
| 445457 | AF168793 | Hs.12743 | carnitine O-octanoyltransferase | 7.255 |
| 420759 | T11832 | Hs.127797 | Homo sapiens cDNA FLJ11381 fis, clone HE | 1.000 |
| 441875 | AI435973 | Hs.128056 | ESTs | 0.013 |
| 441940 | AW298115 | Hs.128152 | ESTs | 6.075 |
| 445537 | AJ245671 | Hs.12844 | EGF-like-domain, multiple 6 | 0.137 |
| 429983 | W92620 | Hs.128656 | ESTs | 162.590 |
| 445600 | AF034803 | Hs.12953 | PTPRF interacting protein, binding prote | 0.969 |
| 437553 | AI829935 | Hs.130497 | ESTs, Weakly similar to MAT8_HUMAN CHLOR | 9.163 |
| 459204 | AW194601 | Hs.13219 | ESTs | 1.000 |
| 439842 | AI910896 | Hs.132413 | ESTs | 1.000 |
| 443113 | AI040686 | Hs.132908 | ESTs | 0.069 |
| 423853 | AB011537 | Hs.133466 | slit (Drosophila) homolog 1 | 0.100 |
| 420792 | AA280321 | Hs.13392 | tethering factor SEC34 | 16.103 |
| 427719 | AI393122 | Hs.134726 | ESTs | 0.667 |
| 443861 | AW449462 | Hs.134743 | ESTs | 5.100 |
| 447578 | AA912347 | Hs.136585 | ESTs, Weakly similar to JC5314 CDC28/cdc | 1.691 |
| 445550 | AI242754 | Hs.137306 | ESTs | 0.006 |
| 454284 | AW297935 | Hs.138493 | ESTs, Moderately similar to ALU7_HUMAN A | 0.003 |
| 418937 | T71508 | Hs.13861 | ESTs, Weakly similar to T42383 probable | 0.042 |
| 424098 | AF077374 | Hs.139322 | small proline-rich protein 3 | 1.347 |
| 453370 | AI470523 | Hs.139336 | ATP-binding cassette, sub-family C (CFTR | 0.186 |
| 424099 | AF071202 | Hs.139336 | ATP-binding cassette, sub-family C (CFTR | 47.949 |
| 426900 | AW163564 | Hs.142375 | ESTs | 0.404 |
| 439337 | AA448718 | Hs.142505 | ESTs | 0.012 |
| 427961 | AW293165 | Hs.143134 | ESTs | 0.073 |
| 419888 | AI243493 | Hs.144049 | ESTs | 11.958 |
| 413943 | AW294416 | Hs.144687 | Homo sapiens cDNA FLJ12981 fis, clone NT | 77.269 |
| 445871 | AI702901 | Hs.145582 | ESTs, Weakly similar to FOR4 MOUSE FORMI | 183.782 |
| 445911 | AI985987 | Hs.145645 | ESTs, Moderately similar to ALU1_HUMAN A | 0.362 |
| 424395 | M165082 | Hs.146388 | microtubule-associated protein 7 | 203.038 |
| 424411 | NM_005209 | Hs.146549 | crystallin, beta A2 | 1.808 |
| 444517 | AI939339 | Hs.146883 | ESTs | 0.004 |
| 445020 | AI205655 | Hs.147221 | ESTs | 0.307 |
| 422109 | S73265 | Hs.1473 | gastrin-releasing peptide | 1.000 |
| 445352 | AI221087 | Hs.147761 | ESTs | 0.015 |
| 444444 | AI149332 | Hs.14855 | ESTs | 140.859 |
| 444152 | AI125694 | Hs.149305 | hypothetical protein MGC2603 | 2.037 |
| 446248 | AI283014 | Hs.149638 | ESTs | 0.018 |
| 433159 | A9035898 | Hs.150587 | kinesin-like protein 2 | 0.110 |
| 428004 | AA449563 | Hs.151393 | glutamate-cysteine ligase, catalytic sub | 3.179 |
| 456840 | H03754 | Hs.152213 | wingless-type MMTV integration site fami | 0.005 |
| 456844 | AI264155 | Hs.152981 | CDP-diacylglycerol synthase (phosphatida | 1.111 |
| 425206 | NM_002153 | Hs.155109 | hydroxysteroid (17-beta) dehydrogenase 2 | 257.949 |
| 446082 | AI274139 | Hs.156452 | ESTs | 0.779 |
| 444946 | AW139205 | Hs.156457 | hypothetical protein FLJ22408 | 1.919 |
| 446636 | AC002563 | Hs.15767 | citron (rho-interacting, serine/threonin | 0.417 |
| 447073 | AW204821 | Hs.157726 | ESTs | 10.349 |
| 422765 | AW409701 | Hs.1578 | baculoviral IAP repeat-containing 5 (sur | 1.839 |
| 446673 | NM_016361 | Hs.15871 | LPAP for lysophosphatidic acid phosphata | 1.691 |
| 447475 | AI380797 | Hs.158992 | ESTs | 44.641 |
| 425776 | U25128 | Hs.159499 | parathyroid hormone receptor 2 | 0.340 |
| 418343 | AA216372 | Hs.159501 | ESTs | 0.023 |
| 441143 | AI027604 | Hs.159650 | ESTs | 0.280 |
| 440917 | AA909651 | Hs.160025 | ESTs | 1.000 |
| 418365 | AW014345 | Hs.161690 | ESTs | 0.066 |
| 431839 | AW020280 | Hs.162025 | ESTs | 0.005 |
| 446839 | BE091926 | Hs.16244 | mitotic spindle coiled-coil related prot | 0.606 |
| 438817 | AI023799 | Hs.163242 | ESTs | 2.202 |
| 432441 | AW292425 | Hs.163484 | ESTs | 2.305 |
| 442577 | AA292998 | Hs.163900 | ESTs | 688.038 |
| 435212 | AW300100 | Hs.164185 | ESTs | 0.002 |
| 425048 | H05468 | Hs.164502 | ESTs | 0.083 |
| 442083 | R50192 | Hs.165062 | ESTs | 3.844 |
| 423536 | L22075 | Hs.1666 | guanine nucleotide binding protein (G pr | 0.157 |
| 418678 | NM_001327 | Hs.167379 | cancer/testis antigen | 269.487 |
| 446989 | AK001898 | Hs.16740 | hypothetical protein FLJ11036 | 0.208 |
| 456967 | AW004056 | Hs.168357 | T-box 2 | 160.397 |
| 447979 | AI457197 | Hs.170348 | ESTs | 0.016 |
| 458814 | AI498957 | Hs.170861 | ESTs, Weakly similar to Z195_HUMAN ZINC | 1.036 |
| 446312 | BE087853 | Hs.171802 | ESTs, Weakly similar to T08729 RING zinc | 1.334 |
| 426783 | Z19084 | Hs.172210 | MUF1 protein | 1.654 |
| 423916 | AW993496 | Hs.17235 | Homo sapiens clone TCCCIA00176 mRNA sequ | 154.064 |
| 409092 | AI735283 | Hs.172608 | ESTs | 0.007 |
| 426853 | U32974 | Hs.172777 | baculoviral IAP repeat-containing 4 | 0.009 |
| 426968 | U07616 | Hs.173034 | amphiphysin (Stiff-Mann syndrome with br | 0.002 |
| 407581 | R48402 | Hs.173508 | P3ECSL | 0.866 |
| 427239 | BE270447 | Hs.174070 | ubiquitin carrier protein | 15.708 |
| 427268 | X78520 | Hs.174139 | chloride channel 3 | 207.936 |
| 436577 | W84774 | Hs.17643 | ESTs | 62.333 |
| 420876 | AA918425 | Hs.177744 | ESTs | 32.959 |
| 427528 | AU077143 | Hs.179565 | minichromosome maintenance deficient (S. | 1.171 |
| 427585 | D31152 | Hs.179729 | collagen, type X, alpha 1 (Schmid metaph | 1.000 |
| 427747 | AW411425 | Hs.180655 | serine/threonine kinase 12 | 12.446 |
| 429813 | AW139678 | Hs.180791 | ESTs | 0.013 |
| 439806 | AA846824 | Hs.180908 | ESTs | 0.561 |
| 427878 | C05766 | Hs.181022 | CGI-07 protein | 0.002 |
| 440284 | AA912032 | Hs.181059 | ESTs, Weakly similar to 2108276A ssDNA-b | 0.030 |
| 427922 | AK001934 | Hs.181112 | HSPC126 protein | 0.039 |
| 427972 | AA864870 | Hs.181304 | putative gene product | 0.004 |
| 428071 | AF212848 | Hs.182339 | ets homologous factor | 4.321 |
| 428336 | AA503115 | Hs.183752 | microseminoprotein, beta- | 145.128 |
| 428450 | NM_014791 | Hs.184339 | KIAA0175 gene product | 0.370 |
| 428479 | Y00272 | Hs.184572 | cell division cycle 2, G1 to S and G2 to | 0.632 |
| 438746 | AI885815 | Hs.184727 | ESTs | 0.339 |
| 420557 | AA960844 | Hs.186579 | Homo sapiens , clone IMAGE: 4081483, mRNA | 0.006 |
| 431014 | W67730 | Hs.187573 | ESTs | 0.344 |
| 428651 | AF196478 | Hs.188401 | annexin A10 | 1.459 |
| 416225 | AA577730 | Hs.188684 | ESTs, Weakly similar to PC4259 ferritin | 0.502 |
| 432497 | AA551104 | Hs.189048 | ESTs, Moderately similar to ALUC_HUMAN ! | 2.499 |
| 431474 | AL133990 | Hs.190642 | ESTs | 0.044 |
| 427742 | AA411880 | Hs.190888 | ESTs | 0.158 |
| 428058 | AI821625 | Hs.191602 | ESTs | 0.006 |
| 431245 | AA496933 | Hs.191687 | ESTs | 0.006 |
| 453204 | R10799 | Hs.191990 | ESTs | 1.734 |
| 436608 | AA628980 | Hs.192371 | down syndrome critical region protein DS | 115.500 |
| 447342 | AI199268 | Hs.19322 | Homo sapiens , Similar to RIKEN cDNA 2010 | 0.152 |
| 454032 | W31790 | Hs.194293 | ESTs, Weakly similar to I54374 gene NF2 | 60.103 |
| 449121 | AI915858 | Hs.194980 | ESTs | 0.003 |
| 447827 | U73727 | Hs.19718 | protein tyrosine phosphatase, receptor t | 305.974 |
| 438401 | AL046321 | Hs.197484 | ESTs, Weakly similar to JC4296 ring fing | 0.002 |
| 457200 | U33749 | Hs.197764 | thyroid transcription factor 1 | 0.011 |
| 429211 | AF052693 | Hs.198249 | gap junction protein, beta 5 (connexin 3 | 9.390 |
| 429257 | AW163799 | Hs.198365 | 2,3-bisphosphoglycerate mutase | 178.436 |
| 429276 | AF056085 | Hs.198612 | G protein-coupled receptor 51 | 0.729 |
| 449818 | AW594365 | Hs.199365 | ESTs | 1.000 |
| 429345 | R11141 | Hs.199695 | hypothetical protein | 7.339 |
| 443564 | AI921685 | Hs.199713 | ESTs | 0.001 |
| 449847 | AW204447 | Hs.199750 | organic anion transporter polypeptide-re | 1.000 |
| 449351 | AW016537 | Hs.200760 | ESTs | 0.005 |
| 426322 | J05068 | Hs.2012 | transcobalamin I (vitamin B12 binding pr | 381.474 |
| 434411 | AA632649 | Hs.201372 | ESTs | 0.039 |
| 448045 | AJ297436 | Hs.20166 | prostate stem cell antigen | 2.337 |
| 446555 | AV659046 | Hs.201847 | ESTs | 0.024 |
| 450411 | D61167 | Hs.202156 | ESTs | 0.004 |
| 442282 | AW451086 | Hs.202390 | ESTs | 1.000 |
| 427587 | BE348244 | Hs.202628 | ESTs, Weakly similar to I78885 serine/th | 228.705 |
| 429486 | AF155827 | Hs.203963 | hypothetical protein FLJ10339 | 0.133 |
| 426682 | AV660038 | Hs.2056 | UDP glycosyltransferase 1 family, polype | 2.070 |
| 426746 | J03626 | Hs.2057 | uridine monophosphate synthetase (orotat | 0.528 |
| 448275 | BE514434 | Hs.20830 | kinesin-like 2 | 19.718 |
| 459058 | H85939 | Hs.209605 | EST | 0.005 |
| 441795 | N58115 | Hs.21137 | AD024 protein | 1.000 |
| 451592 | AI805416 | Hs.213897 | ESTs | 0.012 |
| 443367 | AW071349 | Hs.215937 | ESTs | 0.003 |
| 415949 | H10562 | Hs.21691 | ESTs | 0.072 |
| 444008 | BE544855 | Hs.220756 | ESTs, Weakly similar to SFR4_HUMAN SPLIC | 213.962 |
| 432548 | AW973399 | Hs.22133 | hypothetical protein FLJ20121 | 0.250 |
| 427867 | NM_005073 | Hs.2217 | solute carrier family 15 (oligopeptide t | 0.010 |
| 453123 | AI953718 | Hs.221849 | ESTs | 0.566 |
| 439569 | AW602166 | Hs.222399 | CEGP1 protein | 10.625 |
| 428227 | AA321649 | Hs.2248 | small inducible cytokine subfamily B (Cy | 27.603 |
| 435956 | AF269255 | Hs.22604 | lysosomal apyrase-like protein 1 | 127.564 |
| 453883 | AI638516 | Hs.22630 | cofactor required for Sp 1 transcriptiona | 2.216 |
| 431253 | R06428 | Hs.226351 | ESTs | 0.023 |
| 453900 | AW003582 | Hs.226414 | ESTs, Weakly similar to ALU8_HUMAN ALU S | 0.103 |
| 430034 | X60155 | Hs.227767 | zinc finger protein 41 | 1.000 |
| 423017 | AW178761 | Hs.227948 | sense (or cysteine) proteinase inhibito | 0.024 |
| 417997 | AA418189 | Hs.23017 | Homo sapiens cDNA: FLJ22747 fis, clone K | 1.635 |
| 441362 | BE614410 | Hs.23044 | RAD51 (S. cerevisiae) homolog (E coli Re | 120.167 |
| 452956 | AW003578 | Hs.231872 | ESTs | 1.000 |
| 446009 | AI989885 | Hs.231926 | ESTs | 4.000 |
| 430499 | AW969408 | Hs.231991 | ESTs | 0.014 |
| 448560 | BE613183 | Hs.23213 | ESTs | 285.090 |
| 441508 | AW015203 | Hs.232237 | ESTs | 0.261 |
| 453228 | AW628325 | Hs.232327 | ESTs | 1.000 |
| 442167 | H18740 | Hs.23248 | hypothetical protein from EUROIMAGE 2005 | 0.240 |
| 453321 | AI984381 | Hs.232521 | ESTs | 0.609 |
| 449207 | AL044222 | Hs.23255 | nucleoporin 155 kD | 0.551 |
| 430152 | AB001325 | Hs.234642 | aquaponin 3 | 1.040 |
| 439239 | AI031540 | Hs.235331 | ESTs | 0.598 |
| 435087 | AW975241 | Hs.23567 | ESTs | 0.007 |
| 451276 | AW294386 | Hs.236533 | ESTs, Highly similar to dJ742C19.2 [H. sa | 0.012 |
| 447343 | AA256641 | Hs.236894 | ESTs, Highly similar to S02392 alpha-2-m | 1.280 |
| 431011 | AA490631 | Hs.23783 | ESTs | 0.016 |
| 430307 | BE513442 | Hs.238944 | hypothetical protein FLJ10631 | 284.526 |
| 444371 | BE540274 | Hs.239 | forkhead box M1 | 3.691 |
| 424264 | D80400 | Hs.239388 | Human DNA sequence from clone RP1-B14 | 0.255 |
| 449722 | BE280074 | Hs.23960 | cyclin B1 | 0.467 |
| 430486 | BE062109 | Hs.241551 | chloride channel, calcium activated, fam | 13.419 |
| 430168 | AW968343 | Hs.24255 | DKFZP434l1735 protein | 1.192 |
| 452292 | AW139588 | Hs.244369 | ESTs | 1.000 |
| 412661 | N32860 | Hs.24611 | ESTs, Weakly similar to I54374 gene NF2 | 2.500 |
| 456682 | AW500321 | Hs.246766 | Homo sapiens cDNA FLJ12360 fis, clone MA | 0.014 |
| 457343 | NM_013936 | Hs.247862 | olfactory receptor, family 12, subfamily | 0.233 |
| 430978 | U53583 | Hs.248182 | olfactory receptor, family 1, subfamily | 1.000 |
| 431020 | AF097874 | Hs.248226 | caspase 14, apoptosis-related cysteine p | 5.866 |
| 431070 | AW408164 | Hs.249184 | transcription factor 19 (SC1) | 1.838 |
| 431098 | AW501465 | Hs.249230 | ribonuclease L (2′,5′-oligoisoadenylate | 0.004 |
| 454170 | AW177225 | Hs.250158 | ESTs | 0.243 |
| 439223 | AW238299 | Hs.250618 | UL 16 binding protein 2 | 0.516 |
| 438081 | H49546 | Hs.251391 | claudin 16 | 0.080 |
| 431347 | AI133461 | Hs.251664 | insulin-like growth factor 2 (somatomedi | 843.974 |
| 450663 | H43540 | Hs.25292 | ribonuclease HI, large subunit | 5.928 |
| 450684 | AA872605 | Hs.25333 | interleukin 1 receptor, type II | 1.000 |
| 413094 | H24184 | Hs.25413 | TOLLIP protein | 268.885 |
| 450796 | NM_001988 | Hs.25482 | ennoplakin | 1.643 |
| 408827 | AW275730 | Hs.254825 | ESTs | 0.008 |
| 444129 | AW294292 | Hs.256212 | ESTs | 0.002 |
| 430637 | BE160081 | Hs.256290 | S100 calcium-binding protein A11 (calgiz | 3.240 |
| 436138 | H53323 | Hs.25717 | Homo sapiens cDNA: FLJ23454 fis, clone H | 0.679 |
| 450983 | AA305384 | Hs.25740 | ERO1 (S. cerevisiae)-like | 260.231 |
| 453459 | BE047032 | Hs.257789 | ESTs | 2.133 |
| 456536 | AW135986 | Hs.257859 | ESTs | 98.795 |
| 438424 | AI912498 | Hs.25895 | hypothetical protein FLJ14996 | 1.882 |
| 451161 | AA211329 | Hs.26006 | hypothetical protein FLJ10559 | 0.012 |
| 430634 | AI860651 | Hs.26685 | calcyphosine | 9.561 |
| 435562 | AL046988 | Hs.268677 | ESTs, Moderately similar to ALU7_HUMAN A | 0.957 |
| 417964 | R71449 | Hs.268760 | ESTs | 0.004 |
| 445703 | AV654845 | Hs.27 | glycine dehydrogenase (decarboxylating; | 1.324 |
| 431846 | BE019924 | Hs.271580 | uroplakin 1B | 303.679 |
| 453074 | AA031813 | Hs.271880 | ESTs | 0.004 |
| 431890 | X17033 | Hs.271986 | integrin, alpha 2 (CD49B,alpha 2 subuni | 1.828 |
| 435182 | AA669386 | Hs.272035 | ESTs, Weakly similar to gonadotropin ind | 0.013 |
| 430791 | AA486293 | Hs.272068 | ESTs, Weakly similar to ALU3_HUMAN ALU S | 8.978 |
| 432136 | AA157632 | Hs.272630 | vacuolar proton pump delta polypeptide | 0.316 |
| 451939 | U80456 | Hs.27311 | single-minded (Drosophila) homolog 2 | 0.014 |
| 451982 | F13036 | Hs.27373 | Homo sapiens mRNA; cDNA DKFZp564O1763 (f | 26.348 |
| 423031 | AI278995 | Hs.27457 | ESTs | 53.288 |
| 455612 | BE042896 | Hs.274848 | ESTs | 21.013 |
| 452046 | AB018345 | Hs.27657 | KIAA0802 protein | 129.013 |
| 436567 | AI492860 | Hs.276904 | ESTs | 0.007 |
| 459006 | AW298631 | Hs.27721 | Wolf-Hirschhorn syndrome candidate 1-lik | 0.031 |
| 430157 | BE348706 | Hs.278543 | ESTs | 99.244 |
| 452012 | AA307703 | Hs.279766 | kinesin family member 4A | 0.408 |
| 433001 | AF217513 | Hs.279905 | clone HQ0310 PRO0310p1 | 1.721 |
| 458663 | AV658444 | Hs.280776 | tankyrase, TRF1-interacting ankyrin-rela | 38.231 |
| 450020 | AI680684 | Hs.282219 | ESTs | 0.003 |
| 435858 | AF254260 | Hs.283009 | tuftelin 1 | 1.516 |
| 430733 | AW975920 | Hs.283361 | ESTs | 1.000 |
| 446024 | AB040946 | Hs.284227 | KIAA1513 protein | 9.424 |
| 433967 | AF113018 | Hs.284302 | PRO1621 protein | 0.008 |
| 438915 | AA280174 | Hs.285681 | Williams-Beuren syndrome chromosome regi | 0.030 |
| 431958 | X63629 | Hs.2877 | cadherin 3, type 1, P-cadherin (placenta | 1.058 |
| 414595 | AA641726 | Hs.289015 | hypothetical protein MGC4171 | 273.013 |
| 432097 | X51730 | Hs.2905 | progesterone receptor | 0.002 |
| 452345 | AA293279 | Hs.29173 | hypothetical protein FLJ20515 | 4.010 |
| 457733 | AW974812 | Hs.291971 | ESTs | 1.000 |
| 441398 | AA932398 | Hs.292036 | ESTs, Weakly similar to B34087 hypotheti | 1.000 |
| 428182 | BE386042 | Hs.293317 | ESTs, Weakly similar to GGC1_HUMAN G ANT | 0.006 |
| 452401 | NM_007115 | Hs.29352 | tumor necrosis factor, alpha-induced pro | 0.003 |
| 433365 | AF026944 | Hs.293797 | ESTs | 0.049 |
| 417151 | AA194055 | Hs.293858 | ESTs | 6.593 |
| 424242 | AA337476 | Hs.293984 | hypothetical protein MGC13102 | 1.656 |
| 432375 | BE536069 | Hs.2962 | S100 calcium-binding protein P | 17.094 |
| 422424 | AI186431 | Hs.296638 | prostate differentiation factor | 2.646 |
| 432410 | X68561 | Hs.2982 | Sp4 transcription factor | 0.007 |
| 426847 | S78723 | Hs.298623 | 5-hydroxytryptamine (serotonin) receptor | 0.005 |
| 454054 | AI336329 | Hs.301519 | Homo sapiens cDNA FLJ12536 fis, clone NT | 0.488 |
| 452142 | AB028947 | Hs.301654 | KIAA1024 protein | 0.009 |
| 449773 | R76294 | Hs.302383 | ESTs | 0.001 |
| 438366 | AA805760 | Hs.303567 | ESTs | 1.000 |
| 452724 | R84810 | Hs.30464 | cyclin E2 | 1.000 |
| 429343 | AK000785 | Hs.307036 | Homo sapiens , Similar to epsin 3, clone | 0.494 |
| 446466 | H38026 | Hs.308 | arrestin 3, retinal (X-arrestin) | 0.022 |
| 430694 | AA810624 | Hs.30936 | ESTs, Weakly similar to H2BH_HUMAN HISTO | 16.744 |
| 432789 | D26361 | Hs.3104 | KIAA0042 gene product | 0.302 |
| 432666 | AW204069 | Hs.312716 | ESTs, Weakly similar to unnamed protein | 0.001 |
| 453028 | AB006532 | Hs.31442 | RecQ protein-like 4 | 13.392 |
| 433091 | Y12642 | Hs.3185 | lymphocyte antigen 6 complex, locus D | 2.766 |
| 427122 | AW057736 | Hs.323910 | HER2 receptor tyrosine kinase (c-erb-b2, | 553.782 |
| 453216 | AL137566 | Hs.32405 | Homo sapiens mRNA; cDNA DKFZp586G0321 (f | 84.115 |
| 443247 | BE614387 | Hs.333893 | c-Myc target JPO1 | 79.385 |
| 439632 | AW410714 | Hs.334437 | hypothetical protein MGC4248 | 337.474 |
| 431448 | AL137517 | Hs.334473 | hypothetical protein DKFZp564O1278 | 0.842 |
| 411248 | AA551538 | Hs.334605 | Homo sapiens cDNA FLJ14408 fis, clone HE | 402.500 |
| 433958 | AW043909 | Hs.334707 | aminoacylase 1 | 191.179 |
| 432842 | AW674093 | Hs.334822 | hypothetical protein MGC4485 | 313.462 |
| 457292 | AI921270 | Hs.334882 | hypothetical protein FLJ14251 | 21.744 |
| 451359 | H85334 | Hs.336623 | ESTs | 0.038 |
| 440249 | AI246590 | Hs.337275 | ESTs | 0.432 |
| 434487 | AF143867 | Hs.337588 | ESTs, Moderately similar to S65657 alpha | 1.102 |
| 447437 | U07225 | Hs.339 | purinergic receptor P2Y, G-protein coupl | 0.483 |
| 447519 | U46258 | Hs.339665 | ESTs | 1.032 |
| 434192 | AW387314 | Hs.34371 | ESTs | 0.003 |
| 453765 | BE279901 | Hs.35091 | hypothetical protein FLJ10775 | 0.056 |
| 441020 | W79283 | Hs.35962 | ESTs | 75.141 |
| 453884 | AA355925 | Hs.36232 | KIAA0186 gene product | 0.138 |
| 453922 | AF053306 | Hs.36708 | budding uninhibited by benzimidazoles 1 | 0.008 |
| 453945 | NM_005171 | Hs.36908 | activating transcription factor 1 | 0.044 |
| 447289 | AW247017 | Hs.36978 | melanoma antigen, family A, 3 | 0.002 |
| 407626 | U39196 | Hs.37169 | potassium inwardly-rectifying channel, s | 0.009 |
| 423620 | N71320 | Hs.39938 | ESTs | 1.000 |
| 436027 | AI864053 | Hs.39972 | ESTs, Weakly similar to 138588 reverse t | 0.042 |
| 407846 | AA426202 | Hs.40403 | Cbp/p300-interacting transactivator, wit | 1.810 |
| 443133 | AI033878 | Hs.41379 | ESTs | 0.534 |
| 434534 | H90477 | Hs.41407 | ESTs | 0.013 |
| 452934 | AA581322 | Hs.4213 | hypothetical protein MGC16207 | 3.679 |
| 434952 | T10269 | Hs.4285 | Homo sapiens cDNA: FLJ22505 fis, clone H | 2.885 |
| 432237 | AK001926 | Hs.44143 | polybromo 1 | 0.010 |
| 420900 | AL045633 | Hs.44269 | ESTs | 10.436 |
| 408522 | AI541214 | Hs.46320 | Small proline-rich protein SPRK [human, | 3.393 |
| 435099 | AC004770 | Hs.4756 | flap structure-specific endonuclease 1 | 386.256 |
| 431009 | BE149762 | Hs.48956 | gap junction protein, beta 6 (connexin 3 | 0.922 |
| 408947 | AL080093 | Hs.49117 | Homo sapiens mRNA; cDNA DKFZp564N1662 (f | 0.003 |
| 435647 | AI653240 | Hs.49823 | ESTs | 175.910 |
| 435854 | AJ278120 | Hs.4996 | putative ankyrin-repeat containing prote | 2.584 |
| 436291 | BE568452 | Hs.5101 | protein regulator of cytokinesis 1 | 0.610 |
| 455506 | AA703584 | Hs.5105 | hypothetical protein FLJ10569 | 0.008 |
| 436481 | AA379597 | Hs.5199 | HSPC150 protein similar to ubiquitin-con | 1.089 |
| 4092807 | AL080213 | Hs.52792 | Homo sapiens mRNA; cDNA DKFZp586l1823 (f | 16.910 |
| 435047 | AA454985 | Hs.54973 | cadherin-like protein VR20 | 0.612 |
| 439750 | AL359053 | Hs.57664 | Homo sapiens mRNA full length insert cDN | 5.938 |
| 439452 | AA918317 | Hs.57987 | B-cell CLL/lymphoma 11B (zinc finger pro | 1.000 |
| 439482 | W70045 | Hs.58089 | ESTs | 0.118 |
| 439606 | W79123 | Hs.58561 | G protein-coupled receptor 87 | 0.095 |
| 439706 | AW872527 | Hs.59761 | ESTs, Weakly similar to DAP1_HUMAN DEATH | 0.055 |
| 452240 | AI591147 | Hs.61232 | ESTs | 0.221 |
| 452316 | AA298484 | Hs.61265 | ESTs, Moderately similar to G786_HUMAN P | 2.595 |
| 452747 | BE153855 | Hs.61460 | Ig superfamily receptor LNIR | 3.677 |
| 434876 | AF160477 | Hs.61460 | Ig superfamily receptor LNIR | 7.587 |
| 444783 | AK001468 | Hs.62180 | anillin (Drosophila Scraps homolog), act | 0.046 |
| 438779 | NM_003787 | Hs.6414 | nucleolar protein 4 | 0.030 |
| 439453 | BE264974 | Hs.6566 | thyroid hormone receptor interactor 13 | 12.016 |
| 440126 | AA975145 | Hs.66194 | ESTs | 0.008 |
| 451291 | R39288 | Hs.6702 | ESTs | 0.012 |
| 439963 | AW247529 | Hs.6793 | platelet-activating factor acetylhydrola | 1.653 |
| 440006 | AK000517 | Hs.6844 | hypothetical protein FLJ20510 | 8.628 |
| 437044 | AL035864 | Hs.69517 | cDNA for differentially expressed CO16 g | 140.908 |
| 418107 | R41726 | Hs.7284 | ESTs | 0.146 |
| 436326 | BE085236 | Hs.75313 | aldo-keto reductase family 1, member B1 | 0.649 |
| 433675 | AW977653 | Hs.75319 | ribonucleotide reductase M2 polypeptide | 0.237 |
| 414416 | AW409985 | Hs.76084 | hypothetical protein MGC2721 | 2.242 |
| 414430 | AI346201 | Hs.76118 | ubiquitin carboxyl-terminal esterase L1 | 0.202 |
| 414682 | AL021154 | Hs.76884 | inhibitor of DNA binding 3, dominant neg | 2.318 |
| 414807 | AI738616 | Hs.77348 | hydroxyprostaglandin dehydrogenase 15-(N | 1.622 |
| 414907 | X90725 | Hs.77597 | polo (Drosophia)-like kinase | 246.564 |
| 451575 | AA767622 | Hs.78893 | KIAA0244 protein | 1.000 |
| 400303 | AA242758 | Hs.79136 | LIV-1 protein, estrogen regulated | 4.552 |
| 416498 | U33632 | Hs.79351 | potassium channel, subfamily K, member 1 | 5.128 |
| 458921 | AI682088 | Hs.79375 | holocarboxylase synthetase (biotin-[prop | 0.246 |
| 409235 | AA188827 | Hs.7988 | ESTs, Weakly similar to I38022 hypotheti | 7.249 |
| 440371 | BE268550 | Hs.80449 | Homo sapiens , clone IMAGE: 3535294, mRNA, | 0.792 |
| 452732 | BE300078 | Hs.80449 | Homo sapiens , clone IMAGE: 3535294, mRNA, | 360.782 |
| 417003 | AL038170 | Hs.80756 | betaine-homocysteine methyltransferase | 60.590 |
| 407584 | W25945 | Hs.8173 | hypothetical protein FLJ10803 | 9.988 |
| 417312 | AW888411 | Hs.81915 | leukemia-associated phosphoprotein p18 ( | 402.705 |
| 417389 | BE260964 | Hs.82045 | midkine (neurite growth-promoting factor | 10.806 |
| 428839 | AI767756 | Hs.82302 | Homo sapiens cDNA FLJ14814 fis, clone NT | 1.051 |
| 438315 | R56795 | Hs.82419 | ESTs | 0.226 |
| 417900 | BE250127 | Hs.82906 | CDC20 (cell division cycle 20, S. cerevi | 26.260 |
| 417933 | X02308 | Hs.82962 | thymidylate synthetase | 221.090 |
| 418067 | AI127958 | Hs.83393 | cystatin E/M | 2.396 |
| 438086 | AA336519 | Hs.83623 | nuclear receptor subfamily 1, group I, m | 1.000 |
| 418205 | L21715 | Hs.83760 | troponin I, skeletal, fast | 0.159 |
| 413385 | M34455 | Hs.840 | indoleamine-pyrrole 2,3 dioxygenase | 0.490 |
| 418322 | AA284166 | Hs.84113 | cyclin-dependent kinase inhibitor 3 (CDK | 3.527 |
| 413529 | U11874 | Hs.846 | interleukin 8 receptor, beta | 0.077 |
| 458027 | L49054 | Hs.85195 | myeloid leukemia factor 1 | 0.008 |
| 418543 | NM_005329 | Hs.85962 | hyaluronan synthase 3 | 1.813 |
| 418583 | AA604379 | Hs.86211 | hypothetical protein | 125.769 |
| 441801 | AW242799 | Hs.86366 | ESTs | 55.026 |
| 414792 | BE314949 | Hs.87128 | hypothetical protein FLJ23309 | 8.139 |
| 407246 | S70348 | Hs.87149 | integrin, beta 3 (platelet glycoprotein | 0.020 |
| 433417 | AA587773 | Hs.8859 | Homo sapiens , Similar to RIKEN cDNA 5830 | 313.141 |
| 445060 | AA830811 | Hs.88808 | ESTs | 1.000 |
| 453450 | AW797627 | Hs.89474 | ADP-ribosylation factor 6 | 137.718 |
| 419227 | BE537383 | Hs.89739 | cholinergic receptor, nicotinic, beta po | 0.006 |
| 401464 | AF039241 | Hs.9028 | histone deacetylase 5 | 6.846 |
| 443162 | T49951 | Hs.9029 | DKFZP434G032 protein | 14.057 |
| 431024 | AA713666 | Hs.90462 | Homo sapiens , clone IMAGE: 4132043, mRNA, | 3.507 |
| 419559 | Y07828 | Hs.91096 | ring finger protein | 0.025 |
| 419741 | NM_007019 | Hs.93002 | ubiquitin carrier protein E2-C | 684.577 |
| 443426 | AF098158 | Hs.9329 | chromosome 20 open reading frame 1 | 0.363 |
| 424457 | AI249036 | Hs.94292 | hypothetical protein FLJ23311 | 175.667 |
| 410348 | AW182663 | Hs.95469 | ESTs | 0.011 |
| 439738 | BE246502 | Hs.9598 | sema domain, immunoglobulin domain (Ig), | 428.231 |
| 421478 | AI683243 | Hs.97258 | ESTs, Moderately similar to S29539 ribos | 0.005 |
| 443767 | BE562136 | Hs.9736 | proteasome (prosome, macropain) 26S subu | 1.168 |
| 426902 | AI125334 | Hs.97408 | ESTs | 37.467 |
| 444874 | AI218496 | Hs.97515 | BRCA1-interacting protein 1; BRCA1-assoc | 0.067 |
| 427356 | AW023482 | Hs.97849 | ESTs | 1.000 |
| 430000 | AW205931 | Hs.99598 | hypothetical protein MG05338 | 0.812 |
| 419485 | AA489023 | Hs.99807 | ESTs, Weakly similar to unnamed protein | 0.342 |
| 420783 | AI659838 | Hs.99923 | lectin, galactoside-binding, soluble, 7 | 19.785 |
| 421934 | AA300625 | | gb: EST13476 Testis tumor Homo sapiens cD | 103.769 |
| 431322 | AW970622 | | gb: EST382704 MAGE resequences, MAGK Homo | 0.258 |
| 424040 | AA334400 | | gb: EST38610 Embryo, 9 week Homo sapiens | 0.011 |
| 433108 | AB002446 | | gb: Homo sapiens mRNA from chromosome 5q2 | 0.023 |
| 458829 | AI557388 | | gb: PT2.1_6_G03.r tumor2 Homo sapiens cDN | 1.000 |
| 459169 | AI905517 | | gb: RC-BT091-210199-105 BT091 Homo sapien | 0.773 |
| 400300 | X03363 | | HER2 receptor tyrosine kinase (c-erb-b2, | 468.462 |
| 440012 | AA861072 | | gb: ak32e05.s1 Soares_testis_NHT Homo sap | 0.002 |
| 412799 | AI267606 | | gb: aq91h03.x1 Stanley Frontal SB pool 1 | 0.010 |
| 412964 | BE019688 | | gb: bb28g08.x1 NIH_MGC_5 Homo sapiens cDN | 0.003 |
| 406992 | S82472 | | gb: beta -pol = DNA polymerase beta (exon a | 0.005 |
| 414969 | 016195 | | gb: C16195 Clontech human aorta polyA mRN | 0.023 |
| 413158 | BE068098 | | gb: CM1-BT0368-061299-060-c09 BT0368 Homo | 0.007 |
| 453823 | AL137967 | | gb: DKFZp761D2315_r1 761 (synonym: hamy2) | 0.994 |
| 453846 | AL157586 | | gb: DKFZp761H0216_r1 761 (synonym: hamy2) | 0.004 |
| 407055 | X89211 | | gb: H. sapiens DNA for endogenous retrovir | 0.037 |
| 415204 | T27434 | | gb: hbc2294 Human pancreatic islet Homo s | 76.500 |
| 434572 | AF147340 | | gb: Homo sapiens full length insert cDNA | 0.030 |
| 438990 | AF085890 | | gb: Homo sapiens full length insert cDNA | 1.000 |
| 439780 | AL109688 | | gb: Homo sapiens mRNA full length insert | 0.256 |
| 413671 | Z43712 | | gb: HSC1JA121 normalized infant brain cDN | 0.009 |
| 406974 | M57293 | | gb: Human parathyroid hormone-related pep | 0.004 |
| 455797 | BE091833 | | gb: IL2-BT0731-260400-076-F04 BT0731 Homo | 2.616 |
| 455807 | BE141140 | | gb: MR0-HT0075-021299-006-d07 HT0075 Homo | 0.413 |
| 432189 | AA527941 | | gb: nh30c04.s1 NCI_CGAP_Pr3 Homo sapiens | 0.015 |
| 443309 | AI821874 | | gb: nt58f10.x5 NCI_CGAP_Pr3 Homo sapiens | 0.007 |
| 437240 | AA747537 | | gb: nx85c05.s1 NCI_CGAP_GCB1 Homo sapiens | 0.006 |
| 455189 | AW864176 | | gb: PM0-SN0014-260400-002-b08 SN0014 Homo | 0.069 |
| 444163 | AI126098 | | gb: qc54g07.x1 Soares_placenta_8to9weeks_{—} | 394.282 |
| 455170 | AW860972 | | gb: QV0-CT0387-180300-167-h07 CT0387 Homo | 0.757 |
| 454789 | BE156314 | | gb: QVO-HT0367-150200-114-d02 HT0367 Homo | 1.000 |
| 433005 | AW936074 | | gb: QV1-DT0069-010200-057-c12 DT0069 Homo | 0.013 |
| 455380 | BE160188 | | gb: QV1.HT0413-010200-059-g05 HT0413 Homo | 0.249 |
| 455650 | BE064655 | | gb: RC1-BT0313-301299-012-c09 BT0313 Homo | 1.000 |
| 436383 | BE065178 | | gb: RC1-BT0314-020200-012-h01 BT0314 Homo | 1.000 |
| 413100 | BE065208 | | gb: RC1-BT0314-310300-015-b09 BT0314 Homo | 271.372 |
| 428436 | BE080180 | | gb: RC4-BT0629-120200-011-b10 BT0629 Homo | 0.002 |
| 455831 | BE144966 | | gb: RC6-HT0187-201099-031-c04 HT0187 Homo | 0.011 |
| 434414 | AI798376 | | gb: tr34b07.x1 NCI_CGAP_Ov23 Homo sapiens | 293.654 |
| 414221 | AW450979 | | gb: UI-H-BI3-ala-a-12-0-UI.s1 NCI_CGAP_Su | 0.807 |
| 409488 | AW402825 | | gb: UI-HF-BK0-aaq-d-08-0-UI.r1 NIH_MGC_36 | 0.965 |
| 437938 | AI950087 | | gb: wq05c02.x1 NCI_CGAP_Kid12 Homo sapien | 2.952 |
| 451385 | AA017656 | | gb: ze39h01.r1 Soares retina N2b4HR Homo | 7.341 |
| 449325 | AA001162 | | gb: ze48b06.r1 Soares retina N2b4HR Homo | 0.004 |
| 413316 | W91931 | | gb: zh47c01.r1 Soares_fetal_liver_spleen_{—} | 0.004 |
| 401016 | | | | 0.342 |
| 401335 | | | | 0.256 |
| 401555 | | | | 1.000 |
| 401760 | | | | 301.372 |
| 401781 | | | | 247.141 |
| 401961 | | | | 1.722 |
| 402239 | | | | 5.180 |
| 402305 | | | | 0.917 |
| 402424 | | | | 551.141 |
| 402777 | | | | 153.231 |
| 402778 | | | | 0.006 |
| 402837 | | | | 0.367 |
| 402948 | | | | 154.103 |
| 402952 | | | | 17.038 |
| 403142 | | | | 0.196 |
| 403297 | | | | 12.744 |
| 403637 | | | | 0.304 |
| 403657 | | | | 0.032 |
| 404136 | | | | 0.008 |
| 404249 | | | | 0.065 |
| 404875 | | | | 1.105 |
| 404917 | | | | 69.590 |
| 404983 | | | | 1.000 |
| 405238 | | | | 1.000 |
| 405364 | | | | 294.141 |
| 405531 | | | | 1.747 |
| 405601 | | | | 145.551 |
| 405621 | | | | 0.224 |
| 405932 | | | | 1.968 |
| 406117 | | | | 0.333 |
| 406354 | | | | 1.000 |
| 406548 | | | | 0.002 |
| 406599 | | | | 0.010 |
| 459702 | AI204995 | | | 0.449 |

Pkey: Unique Eos probeset identifier number
ExAccn: Exemplar Accession number, Genbank accession number
UnigeneID: Unigene number
Unigene Title: Unigene gene title
R1: Ratio of mRNA expression in bladder tumors compared to normal bladder

[0365] TABLE 2B

| Pkey | CAT Number | Accession |
|---|---|---|
| 409488 | 1134791_1 | AW402825 BE544338 |
| 412799 | 132817_1 | AI267606 AA121045 AA126521 |
| 412964 | 1339278_1 | BE019688 BE144460 |
| 413100 | 1349119_1 | BE065208 BE065224 BE065168 BE065313 |
| 413158 | 1351251_1 | BE068098 BE068119 BE068083 BE068088 BE068120 BE068155 BE068111 |
| 413316 | 1360169_1 | W91931 W94979 BE081744 |
| 413671 | 1382504_1 | Z43712 BE156729 BE156538 BE156731 BE156673 BE156539 BE156674 BE156430 BE156672 BE156675 BE156432 |
| | | BE156541 |
| 414221 | 142696_1 | AW450979 AA136653 AA136656 AW419381 AA984358 AA492073 BE168945 AA809054 AW238038 |
| | | BE011212 BE011359 BE011367 BE011368 BE011362 BE011215 BE011365 BE011363 |
| 414969 | 1510393_1 | C16195 C16230 C16211 C16164 C16251 |
| 415204 | 1529407_1 | T27434 Z25288 F00323 D82802 R85077 |
| 421934 | 209339_1 | AA300625 R16859 R16860 AW898335 W24337 |
| 424040 | 234659_1 | AA334400 AA334257 AW966124 |
| 428436 | 291472_1 | BE080180 AW827313 AW231970 AA995028 AA428584 AW872716 AW892508 AW854593 AA578441 |
| | | AW975234 AA664937 AA984131 AA528743 AA552874 AA564758 AW063245 AI267534 AW070190 AW893483 |
| | | AA770330 AA906928 AA906582 AA758746 AA551717 AW063311 AA429538 |
| 431322 | 331543_1 | AW970622 AA503009 AA502998 AA502989 AA502805 T92188 |
| 432189 | 342819_1 | AA527941 AI810608 AI620190 AA635266 |
| 433005 | 357346_1 | AW939074 AW939073 BE160476 AW939938 AW939206 AW940012 AW939076 AA573577 AW750479 AA574383 |
| | | AW970057 |
| 433108 | 35896_1 | AB002446 T03146 |
| 434414 | 38585_1 | AI798376 S46400 AW811617 AW811616 W00557 BE142245 AW858232 AW861851 AW858362 AA232351 |
| | | AA218567 AA055556 AW858231 AW857541 AW814172 H66214 AW814398 AF134164 AA243093 |
| | | AA173345 AA199942 AA223384 AA227092 AA227080 T12379 AA092174 T61139 AA149776 AA699829 AW879188 |
| | | AW813567 AW813538 AI267168 AA57718 AA157719 AA100472 AA100774 AA130756 AA157705 AA157730 AA157715 |
| | | AA053524 AW849581 AW854566 C05254 AW882836 T92637 AW812621 AA206583 AA209204 BE156909 |
| | | AA226824 AI829309 AW991957 N66951 AA527374 H66215 AA045564 AI694265 H60808 AA149726 AW195620 |
| | | BE081333 BE073424 AW817662 AW817705 AW817703 AW817659 BE081531 H59570 |
| 434572 | 38911_1 | AF147340 T51948 T52029 |
| 436383 | 41888_1 | BE065178 AJ227879 |
| 437240 | 435139_1 | AA747537 BE089068 BE089070 |
| 437938 | 44573_2 | AI950087 N70208 R97040 N36809 AI308119 AW967677 N35320 AI251473 H59397 AW971573 R97278 |
| | | W01059 AW967671 AA908598 AA251875 AI820501 AI820532 W87891 T85904 U71456 T82391 BE328571 |
| | | T75102 R34725 AA884922 BE328517 AI219788 AA884444 N92578 F13493 AA927794 AI560251 AW874068 |
| | | AL134043 AW235363 AA663345 AW008282 AA488964 AA283144 AI890387 AI950344 AI741346 AI689062 |
| | | AA282915 AW102898 AI872193 AI763273 AW173586 AW150329 AI653832 AI762688 AA988777 AA488892 |
| | | AI356394 AW103813 AI539642 AA642789 AA856975 AW505512 AI961530 AW629970 BE612881 AW276997 |
| | | AW513601 AW512843 AA044209 AW856538 AA180009 AA337499 AW961101 AA251669 AA251874 AI819225 |
| | | AW205862 AI683338 AI858509 AW276905 AI633006 AA972584 AA908741 AW072629 AW513996 AA293273 |
| | | AA969759 N75628 N22388 H84729 H60052 T92487 AI022058 AA780419 AA551005 W80701 AW613456 AI373032 |
| | | AI564269 F00531 H83488 W37181 W78802 R66056 AI002839 R67840 AA300207 AW959581 T63226 F04005 |
| 438990 | 46760_1 | AF085890 H29949 H29856 |
| 439780 | 47673_1 | AL109688 R23665 R26578 |
| 440012 | 483290_1 | AA861072 H02819 R25946 |
| 443309 | 56604_1 | AI821874 AI821868 AA630932 AA653897 AA650103 AI821131 AI821124 |
| 444163 | 593658_1 | AI126098 AI184746 AI148521 |
| 449325 | 80480_1 | AA001162 AA018950 AA017505 R84446 |
| 451385 | 86787_1 | AA017656 AA017374 AA019761 |
| 453823 | 982526_1 | AL137967 BE064160 BE064186 |
| 453846 | 983043_1 | AL157586 AL157590 |
| 454789 | 1234742_1 | BE156314 BE156316 AW820750 |
| 455170 | 1256906_1 | AW860972 AW862598 AW862599 AW860988 AW860983 AW860898 AW860925 AW860922 AW860986 AW860984 |
| | | AW860989 |
| 455189 | 1259271_1 | AW864176 AW864133 AW864185 AW864137 |
| 455380 | 1287679_1 | BE160188 AW935785 BE160401 BE160319 BE160313 BE160395 |
| 455650 | 1348720_1 | BE064655 BE153953 |
| 455797 | 1366826_1 | BE091833 BE091874 BE091871 |
| 455807 | 1370914_1 | BE141140 BE141139 BE141105 BE141143 BE141127 BE141202 BE141108 |
| 455831 | 1373969_1 | BE144966 BE144957 BE144958 |
| 458829 | 773443_1 | AI557388 BE158936 |
| 459169 | 920641_1 | AI905517 AI905455 AI905452 |

Pkey: Unique Eos probeset identifier number
CAT number: Gene cluster number
Accession: Genbank accession numbers

[0366] TABLE 2C

| Pkey | Ref | Strand | Nt_position |
|---|---|---|---|
| 401016 | 8117441 | Plus | 126234-126359, 128050-128236 |
| 401335 | 9884881 | Plus | 15736-16352 |
| 401555 | 8099284 | Minus | 162520-162657 |
| 401760 | 9929699 | Plus | 83126-83250, 85320-85540, 94719-95287 |
| 401781 | 7249190 | Minus | 83215-83435, 83531-83656, 83740-83901, 84237-84393, 84955-85037, 86290-86814 |
| 401961 | 4581193 | Minus | 124054-124209 |
| 402239 | 7690131 | Plus | 38175-38304, 42133-42266 |
| 402305 | 7328724 | Plus | 40832-41362 |
| 402424 | 9796344 | Minus | 64925-65073 |
| 402777 | 9588235 | Plus | 126786-126948 |
| 402778 | 9588235 | Plus | 128560-128702 |
| 402837 | 9369121 | Minus | 2013-2186, 9570-9758, 11136-11309, 19429-19677, 21210-21455, 23368-23562, |
| | | | 24342-24527, 29132-29320 |
| 402948 | 9368458 | Minus | 143456-143626, 143808-143935 |
| 402952 | 9408724 | Minus | 119452-119619 |
| 403142 | 9444521 | Plus | 89286-90131 |
| 403297 | 8096824 | Minus | 16584-17264 |
| 403637 | 8671936 | Minus | 142647-142771, 145531-145762 |
| 403657 | 8843996 | Minus | 156223-156370 |
| 404136 | 6981900 | Minus | 42538-46428 |
| 404249 | 8655533 | Plus | 64270-64633 |
| 404875 | 9801324 | Plus | 96588-96732, 97722-97831 |
| 404917 | 7341851 | Plus | 49330-49498 |
| 404983 | 4432779 | Minus | 51178-51374, 52000-52173 |
| 405238 | 7249119 | Minus | 51728-51836 |
| 405364 | 2281075 | Minus | 48325-48491, 49136-49252 |
| 405531 | 9665194 | Plus | 35602-35803 |
| 405601 | 5815493 | Minus | 147835-147935, 149220-149299 |
| 405621 | 5523811 | Plus | 59362-59607 |
| 405932 | 7767812 | Minus | 123525-123713 |
| 406117 | 9142932 | Plus | 54304-54584 |
| 406354 | 9256049 | Minus | 2095-2377 |
| 406548 | 7711514 | Minus | 25138-26762 |
| 406599 | 8248616 | Plus | 10933-11086 |

Pkey: Unique number corresponding to an Eos probeset
Ref: Sequence source. The 7 digit numbers in this column are Genbank Identifier (GI) numbers. “Dunham I. et al.” refers to the publication entitled “The DNA sequence of human chromosome 22.” Dunham I. et al., Nature (1999) 402: 489-495.
Strand: Indicates DNA strand from which exons were predicted.
Nt_position: Indicates nucleotide positions of predicted exons.

[0367] TABLE 3A
Preferred therapeutic targets for bladder cancer

| Pkey | ExAccn | UnigeneID | Unigene Title | R1 | R2 |
|---|---|---|---|---|---|
| 421948 | L42583 | Hs.334309 | keratin 6A | 14.20 | 1.20 |
| 439926 | AW014875 | Hs.137007 | ESTs | 11.31 | 21.34 |
| 413324 | V00571 | Hs.75294 | corticotropin releasing hormone | 9.15 | 45.75 |
| 421110 | AJ250717 | Hs.1355 | cathepsin E | 9.07 | 45.35 |
| 417308 | H60720 | Hs.81892 | KIAA0101 gene product | 8.50 | 1.99 |
| 431211 | M86849 | Hs.323733 | gap junction protein, beta 2, 26 kD (conn | 8.39 | 1.28 |
| 418406 | X73501 | Hs.84905 | cytokeratin 20 | 8.10 | 40.50 |
| 446619 | AU076643 | Hs.313 | secreted phosphoprotein 1 (osteopontin, | 7.98 | 1.38 |
| 433001 | AF217513 | Hs.279905 | clone HQ0310 PRO0310p1 | 7.67 | 2.12 |
| 408243 | Y00787 | Hs.624 | interleukin 8 | 7.56 | 4.85 |
| 417715 | AW969587 | Hs.86366 | ESTs | 7.45 | 4.70 |
| 417720 | AA205625 | Hs.208067 | ESTs | 7.34 | 9.18 |
| 423673 | BE003054 | Hs.1695 | matrix metalloproteinase 12 (macrophage | 7.30 | 26.07 |
| 418007 | M13509 | Hs.83169 | matrix metalloproteinase 1 (interstitial | 7.12 | 35.60 |
| 413753 | U17760 | Hs.75517 | laminin, beta 3 (nicein (125 kD), kalinin | 6.95 | 4.96 |
| 441633 | AW958544 | Hs.112242 | normal mucosa of esophagus specific 1 | 6.42 | 0.89 |
| 422168 | AA586894 | Hs.112408 | S100 calcium-binding protein A7 (psorias | 6.08 | 3.49 |
| 407242 | M18728 | | gb: Human nonspecific crossreacting antig | 5.96 | 0.96 |
| 405033 | | | C1002652*: gi\|544327\|sp\|Q04799\|FMO5_RABIT | 5.84 | 16.22 |
| 449230 | BE613348 | Hs.211579 | melanoma cell adhesion molecule | 5.82 | 2.28 |
| 406685 | M18728 | | gb: Human nonspecific crossreacting antig | 5.80 | 0.89 |
| 420159 | AI572490 | Hs.99785 | Homo sapiens cDNA: FLJ21245 fis, clone C | 5.77 | 28.85 |
| 415511 | AI732617 | Hs.182362 | ESTs | 5.65 | 28.25 |
| 426028 | NM_001110 | Hs.172028 | a disintegrin and metalloproteinase doma | 5.60 | 6.51 |
| 424008 | R02740 | Hs.137555 | putative chemokine receptor; GTP-binding | 5.59 | 2.33 |
| 428651 | AF196478 | Hs.188401 | annexin A10 | 5.55 | 27.75 |
| 400843 | | | NM_003105*: Homo sapiens sortilin-related | 5.51 | 4.92 |
| 402230 | | | Target Exon | 5.36 | 21.44 |
| 452747 | BE153855 | Hs.61460 | Ig superfamily receptor LNIR | 5.33 | 2.80 |
| 416065 | BE267931 | Hs.78996 | proliferating cell nuclear antigen | 5.17 | 1.98 |
| 428450 | NM_014791 | Hs.184339 | KIAA0175 gene product | 4.90 | 2.63 |
| 418322 | AA284166 | Hs.84113 | cyclin-dependent kinase inhibitor 3 (CDK | 4.77 | 2.35 |
| 412610 | X90908 | Hs.74126 | fatty acid binding protein 6, ileal (gas | 4.77 | 3.71 |
| 418663 | AK001100 | Hs.41690 | desmocollin 3 | 4.74 | 1.48 |
| 414683 | S78296 | Hs.76888 | hypothetical protein MGC12702 | 4.74 | 2.92 |
| 442432 | BE093589 | Hs.38178 | hypothetical protein FLJ23468 | 4.68 | 1.61 |
| 424834 | AK001432 | Hs.153408 | Homo sapiens cDNA FLJ10570 fis, clone NT | 4.65 | 11.63 |
| 431958 | X63629 | Hs.2877 | cadherin 3, type 1, P-cadherin (placenta | 4.63 | 2.06 |
| 423725 | AJ403108 | Hs.132127 | hypothetical protein LOC57822 | 4.55 | 3.35 |
| 401780 | | | NM_005557*: Homo sapiens keratin 16 (foca | 4.49 | 1.62 |
| 424308 | AW975531 | Hs.154443 | minichromosome maintenance deficient (S. | 4.43 | 2.39 |
| 401093 | | | C12000586*: gi\|6330167\|dbj\|BAA86477.1\| (A | 4.40 | 12.94 |
| 417933 | X02308 | Hs.82962 | thymidylate synthetase | 4.35 | 2.29 |
| 418113 | AI272141 | Hs.83484 | SRY (sex determining region Y)-box 4 | 4.32 | 2.82 |
| 412140 | AA219691 | Hs.73625 | RAB6 interacting, kinesin-like (rabkines | 4.24 | 8.15 |
| 401781 | | | Target Exon | 4.15 | 1.31 |
| 425234 | AW152225 | Hs.165909 | ESTs, Weakly similar to I38022 hypotheti | 4.14 | 7.39 |
| 432842 | AW674093 | Hs.334822 | hypothetical protein MGC4485 | 4.12 | 2.51 |
| 408380 | AF123050 | Hs.44532 | diubiquitin | 4.11 | 3.26 |
| 449722 | BE280074 | Hs.23960 | cyclin B1 | 4.09 | 3.72 |
| 420344 | BE463721 | Hs.97101 | putative G protein-coupled receptor | 4.07 | 2.50 |
| 422809 | AK001379 | Hs.121028 | hypothetical protein FLJ10549 | 4.00 | 7.14 |
| 404977 | | | Insulin-like growth factor 2 (somatomedi | 3.89 | 5.17 |
| 400409 | AF153341 | | Homo sapiens winged helix/forkhead trans | 3.88 | 7.29 |
| 429113 | D28235 | Hs.196384 | prostaglandin-endoperoxide synthase 2 (p | 3.87 | 1.61 |
| 444371 | BE540274 | Hs.239 | forkhead box M1 | 3.87 | 2.75 |
| 443171 | BE281128 | Hs.9030 | TONDU | 3.83 | 9.48 |
| 441362 | BE614410 | Hs.23044 | RAD51 (S. cerevisiae) homolog (E coli Re | 3.82 | 2.98 |
| 439963 | AW247529 | Hs.6793 | platelet-activating factor acetylhydrola | 3.77 | 3.83 |
| 407137 | T97307 | | gb: ye53h05.s1 Soares fetal liver spleen | 3.73 | 4.91 |
| 426088 | AF038007 | Hs.166196 | ATPase, Class I, type 8B, member 1 | 3.68 | 7.08 |
| 443426 | AF098158 | Hs.9329 | chromosome 20 open reading frame 1 | 3.68 | 2.29 |
| 414761 | AU077228 | Hs.77256 | enhancer of zeste (Drosophila) homolog 2 | 3.67 | 3.06 |
| 413063 | AL035737 | Hs.75184 | chitinase 3-like 1 (cartilage glycoprote | 3.67 | 1.18 |
| 421508 | NM_004833 | Hs.105115 | absent in melanoma 2 | 3.67 | 3.65 |
| 443162 | T49951 | Hs.9029 | DKFZP434G032 protein | 3.66 | 3.21 |
| 418478 | U38945 | Hs.1174 | cyclin-dependent kinase inhibitor 2A (me | 3.66 | 3.57 |
| 417771 | AA804698 | Hs.82547 | retinoic acid receptor responder (tazaro | 3.62 | 2.73 |
| 441495 | AW294603 | Hs.127039 | ESTs | 3.60 | 2.71 |
| 422282 | AF019225 | Hs.114309 | apolipoprotein L | 3.57 | 3.92 |
| 417079 | U65590 | Hs.81134 | interleukin 1 receptor antagonist | 3.55 | 0.80 |
| 417275 | X63578 | Hs.295449 | parvalbumin | 3.54 | 4.60 |
| 440006 | AK000517 | Hs.6844 | hypothetical protein FLJ20510 | 3.52 | 2.59 |
| 418203 | X54942 | Hs.83758 | CDC28 protein kinase 2 | 3.50 | 3.61 |
| 400289 | X07820 | Hs.2258 | matrix metalloproteinase 10 (stromelysin | 3.50 | 17.50 |
| 404875 | | | NM_022819*: Homo sapiens phospholipase A2 | 3.46 | 3.24 |
| 420005 | AW271106 | Hs.133294 | ESTs | 3.40 | 2.22 |
| 409757 | NM_001898 | Hs.123114 | cystatin SN | 3.39 | 2.93 |
| 427719 | AI393122 | Hs.134726 | ESTs | 3.31 | 2.51 |
| 406690 | M29540 | Hs.220529 | carcinoembryonic antigen-related cell ad | 3.28 | 0.42 |
| 422283 | AW411307 | Hs.114311 | CDC45 (cell division cycle 45, S. cerevis | 3.28 | 2.62 |
| 406081 | | | Target Exon | 3.25 | 13.54 |
| 426514 | BE616633 | Hs.170195 | bone morphogenetic protein 7 (osteogenic | 3.25 | 2.46 |
| 431009 | BE149762 | Hs.48956 | gap junction protein, beta 6 (connexin 3 | 3.23 | 2.88 |
| 429983 | W92620 | Hs.260855 | ESTs | 3.20 | 2.84 |
| 422158 | L10343 | Hs.112341 | protease inhibitor 3, skin-derived (SKAL | 3.18 | 1.54 |
| 426451 | AI908165 | Hs.169946 | GATA-binding protein 3 (T-cell receptor | 3.17 | 5.44 |
| 411945 | AL033527 | Hs.92137 | v-myc avian myelocytomatosis viral oncog | 3.13 | 15.65 |
| 415752 | BE314524 | Hs.78776 | putative transmembrane protein | 3.11 | 2.46 |
| 408633 | AW963372 | Hs.46677 | PRO2000 protein | 3.11 | 3.30 |
| 409956 | AW103364 | Hs.727 | inhibin, beta A (activin A, activin AB a | 3.09 | 1.52 |
| 412420 | AL035668 | Hs.73853 | bone morphogenetic protein 2 | 3.08 | 2.22 |
| 400297 | AI127076 | Hs.306201 | hypothetical protein DKFZp564O1278 | 3.05 | 12.49 |
| 437931 | AI249468 | Hs.124434 | ESTs | 3.01 | 3.70 |
| 421451 | AA291377 | Hs.50831 | ESTs | 2.99 | 14.95 |
| 426682 | AV660038 | Hs.2056 | UDP glycosyltransferase 1 family, polype | 2.97 | 2.10 |
| 402239 | | | Target Exon | 2.97 | 3.37 |
| 429345 | R11141 | Hs.199695 | hypothetical protein | 2.96 | 2.61 |
| 435904 | AF261655 | Hs.8910 | 1,2-alpha-mannosidase IC | 2.93 | 2.13 |
| 423961 | D13666 | Hs.136348 | periostin (OSF-2os) | 2.93 | 1.44 |
| 420923 | AF097021 | Hs.273321 | differentially expressed in hematopoieti | 2.92 | 0.95 |
| 436608 | AA628980 | | down syndrome critical region protein DS | 2.92 | 4.86 |
| 447343 | AA256641 | Hs.236894 | ESTs, Highly similar to S02392 alpha-2-m | 2.88 | 2.93 |
| 439223 | AW238299 | Hs.250618 | UL16 binding protein 2 | 2.88 | 2.15 |
| 401747 | | | Homo sapiens keratin 17 (KRT17) | 2.88 | 3.44 |
| 410102 | AW248508 | Hs.279727 | ESTs; homologue of PEM-3 [Ciona savignyi | 2.86 | 14.30 |
| 444444 | AI149332 | Hs.14855 | ESTs | 2.85 | 2.68 |
| 421100 | AW351839 | Hs.124660 | Homo sapiens cDNA: FLJ21763 fis, clone C | 2.84 | 2.46 |
| 431070 | AW408164 | Hs.249184 | transcription factor 19 (SC1) | 2.78 | 2.26 |
| 417389 | BE260964 | Hs.82045 | midkine (neurite growth-promoting factor | 2.77 | 2.34 |
| 442994 | AI026718 | Hs.16954 | ESTs | 2.75 | 2.82 |
| 444381 | BE387335 | Hs.283713 | ESTs, Weakly similar to S64054 hypotheti | 2.74 | 2.44 |
| 434487 | AF143867 | Hs.337588 | ESTs, Moderately similar to S65657 alpha | 2.72 | 3.37 |
| 417003 | AL038170 | Hs.80756 | betaine-homocysteine methyltransferase | 2.69 | 2.70 |
| 404440 | | | NM_021048: Homo sapiens melanoma antigen, | 2.69 | 13.45 |
| 400844 | | | NM_003105*: Homo sapiens sortilin-related | 2.69 | 13.45 |
| 426322 | J05068 | Hs.2012 | transcobalamin I (vitamin B12 binding pr | 2.69 | 1.36 |
| 431448 | AL137517 | Hs.306201 | hypothetical protein DKFZp564O1278 | 2.69 | 12.08 |
| 403381 | | | ENSP00000231844*: Ecotropic virus integra | 2.68 | 13.40 |
| 411248 | AA551538 | Hs.334605 | Home sapiens cDNA FLJ14408 fis, clone HE | 2.68 | 2.43 |
| 425206 | NM_002153 | Hs.155109 | hydroxysteroid (17-beta) dehydrogenase 2 | 2.67 | 2.68 |
| 435099 | AC004770 | Hs.4756 | flap structure-specific endonuclease 1 | 2.67 | 1.79 |
| 409361 | NM_005982 | Hs.54416 | sine oculis homeobox (Drosophila) homolo | 2.65 | 0.73 |
| 413281 | AA861271 | Hs.222024 | transcription factor BMAL2 | 2.65 | 2.23 |
| 446082 | AI274139 | Hs.156452 | ESTs | 2.65 | 2.65 |
| 422424 | AI186431 | Hs.296638 | prostate differentiation factor | 2.64 | 2.68 |
| 407839 | AA045144 | Hs.161566 | ESTs | 2.64 | 1.08 |
| 432441 | AW292425 | Hs.163484 | ESTs | 2.64 | 6.14 |
| 417312 | AW888411 | Hs.250811 | leukemia-associated phosphoprotein p18( | 2.64 | 1.31 |
| 430157 | BE348706 | Hs.278543 | ESTs | 2.63 | 2.58 |
| 436481 | AA379597 | Hs.5199 | HSPC150 protein similar to ubiquitin-con | 2.61 | 1.93 |
| 418686 | Z36830 | Hs.87268 | annexin A8 | 2.60 | 1.62 |
| 430486 | BE062109 | Hs.241551 | chloride channel, calcium activated, fam | 2.59 | 2.87 |
| 429276 | AF056085 | Hs.198612 | G protein-coupled receptor 51 | 2.57 | 3.89 |
| 439738 | BE246502 | Hs.9598 | sema domain, immunoglobulin domain (Ig), | 2.57 | 2.49 |
| 409632 | W74001 | Hs.55279 | serine (or cysteine) proteinase inhibito | 2.56 | 1.43 |
| 414812 | X72755 | Hs.77367 | monokine induced by gamma interferon | 2.54 | 3.10 |
| 451668 | Z43948 | Hs.326444 | cartilage acidic protein 1 | 2.51 | 3.60 |
| 421379 | Y15221 | Hs.103982 | small inducible cytokine subfamily B (Cy | 2.50 | 2.91 |
| 414416 | AW409985 | Hs.76084 | hypothetical protein MGC2721 | 2.49 | 1.78 |
| 429612 | AF062649 | Hs.252587 | pituitary tumor-transforming 1 | 2.49 | 1.80 |
| 416658 | U03272 | Hs.79432 | fibrillin 2 (congenital contractural ara | 2.49 | 3.46 |
| 437553 | AI829935 | Hs.130497 | ESTs, Weakly similar to MAT8_HUMAN CHLOR | 2.48 | 2.36 |
| 418941 | AA452970 | Hs.239527 | E1B-55 kDa-associated protein 5 | 2.46 | 2.33 |
| 414807 | AI738616 | Hs.77348 | hydroxyprostaglandin dehydrogenase 15-(N | 2.44 | 2.49 |
| 450983 | AA305384 | Hs.25740 | ERO1 (S. cerevisiae)-like | 2.43 | 1.42 |
| 407788 | BE514982 | Hs.38991 | S100 calcium-binding protein A2 | 2.41 | 2.05 |
| 449019 | AI949095 | Hs.67776 | ESTs, Weakly similar to T22341 hypotheti | 2.40 | 1.90 |
| 417366 | BE185289 | Hs.1076 | small proline-rich protein 1B (cornifin) | 2.40 | 0.49 |
| 420370 | Y13645 | Hs.97234 | uroplakin 2 | 2.39 | 3.81 |
| 408000 | L11690 | Hs.198689 | bullous pemphigoid antigen 1 (230/240 kD) | 2.38 | 1.45 |
| 406399 | | | NM_003122*: Homo sapiens serine protease | 2.36 | 4.20 |
| 435563 | AF210317 | Hs.95497 | solute carrier family 2 (facilitated glu | 2.31 | 4.05 |
| 442117 | AW664964 | Hs.128899 | ESTs; hypothetical protein for IMAGE: 447 | 2.31 | 1.17 |
| 436246 | AW450963 | Hs.119991 | ESTs | 2.30 | 11.50 |
| 433078 | AW015188 | Hs.121575 | Homo sapiens cDNA FLJ12231 fis, clone MA | 2.30 | 2.40 |
| 424012 | AW368377 | Hs.137569 | tumor protein 63 kDa with strong homolog | 2.29 | 1.89 |
| 411263 | BE297802 | Hs.69360 | kinesin-like 6 (mitotic centromere-assoc | 2.28 | 2.14 |
| 432829 | W60377 | Hs.57772 | ESTs | 2.28 | 4.85 |
| 415025 | AW207091 | Hs.72307 | ESTs | 2.28 | 11.40 |
| 436293 | AI601188 | Hs.120910 | ESTs | 2.27 | 3.80 |
| 415989 | AI267700 | | ESTs | 2.27 | 11.35 |
| 418067 | AI127958 | Hs.83393 | cystatin E/M | 2.25 | 1.54 |
| 436291 | BE568452 | Hs.344037 | protein regulator of cytokinesis 1 | 2.25 | 2.45 |
| 422278 | AF072873 | Hs.114218 | frizzled (Drosophila) homolog 6 | 2.25 | 1.55 |
| 428479 | Y00272 | Hs.334562 | cell division cycle 2, G1 to S and G2 to | 2.22 | 11.10 |
| 443247 | BE614387 | Hs.333893 | c-Myc target JPO1 | 2.21 | 1.32 |
| 424364 | AW383226 | Hs.201189 | ESTs, Weakly similar to G01763 atrophin- | 2.21 | 1.52 |
| 405932 | | | C15000305: gi\|3806122\|gb\|AAC69198.1\| (AFO | 2.20 | 1.55 |
| 419741 | NM_007019 | Hs.93002 | ubiquitin carrier protein E2-C | 2.19 | 1.99 |
| 423271 | W47225 | Hs.126256 | interleukin 1, beta | 2.19 | 2.01 |
| 402305 | | | C19000735*: gi\|4508027\|ref\|NP_003414.1\| z | 2.19 | 2.54 |
| 421064 | AI245432 | Hs.101382 | tumor necrosis factor, alpha-induced pro | 2.19 | 2.16 |
| 427747 | AW411425 | Hs.180655 | serine/threonine kinase 12 | 2.18 | 1.80 |
| 437181 | AI306615 | Hs.125343 | ESTs, Weakly similar to KIAA0758 protein | 2.17 | 10.85 |
| 431890 | X17033 | Hs.271986 | integrin, alpha 2 (CD49B, alpha 2 subuni | 2.17 | 2.14 |
| 433437 | U20536 | Hs.3280 | caspase 6, apoptosis-related cysteine pr | 2.16 | 1.37 |
| 407581 | R48402 | Hs.173508 | P3ECSL | 2.15 | 1.95 |
| 400845 | | | NM_003105*: Homo sapiens sortilin-related | 2.15 | 2.23 |
| 419359 | AL043202 | Hs.90073 | chromosome segregation 1 (yeast homolog) | 2.14 | 1.70 |
| 418526 | BE019020 | Hs.85838 | solute carrier family 16 (monocarboxylic | 2.13 | 1.83 |
| 448045 | AJ297436 | Hs.20166 | prostate stem cell antigen | 2.13 | 3.49 |
| 453459 | BE047032 | Hs.257789 | ESTs | 2.13 | 2.30 |
| 419183 | U60669 | Hs.89663 | cytochrome P450, subfamily XXIV (vitamin | 2.12 | 10.60 |
| 436251 | BE515065 | Hs.296585 | nucleolar protein (KKE/D repeat) | 2.11 | 1.89 |
| 445911 | AI985987 | Hs.145645 | ESTs, Moderately similar to ALU1_HUMAN A | 2.11 | 2.57 |
| 420876 | AA918425 | Hs.177744 | ESTs | 2.09 | 2.30 |
| 438817 | AI023799 | Hs.163242 | ESTs | 2.09 | 10.45 |
| 434293 | NM_004445 | Hs.3796 | EphB6 | 2.08 | 2.42 |
| 422765 | AW409701 | Hs.1578 | baculoviral IAP repeat-containing 5 (sur | 2.08 | 2.10 |
| 418216 | AA662240 | Hs.283099 | AF15q14 protein | 2.08 | 4.62 |
| 437915 | AI637993 | Hs.202312 | Homo sapiens clone N11 NTera2D1 teratoca | 2.08 | 10.40 |
| 409420 | Z15008 | Hs.54451 | laminin, gamma 2 (nicein (100 kD), kalini | 2.05 | 5.39 |
| 431441 | U81961 | Hs.2794 | sodium channel, nonvoltage-gated 1 alpha | 2.05 | 1.20 |
| 400773 | | | NM_003105*: Homo sapiens sortilin-related | 2.05 | 1.78 |
| 414987 | AA524394 | Hs.294022 | hypothetical protein FLJ14950 | 2.04 | 2.06 |
| 424687 | J05070 | Hs.151738 | matrix metalloproteinase 9 (gelatinase B | 2.04 | 1.70 |
| 444476 | AF020038 | Hs.11223 | isocitrate dehydrogenase 1 (NADP), solub | 2.03 | 2.26 |
| 447437 | U07225 | Hs.339 | purinergic receptor P2Y, (G-protein coupl | 2.02 | 1.73 |
| 445537 | AJ245671 | Hs.12844 | EGF-like-domain, multiple 6 | 2.02 | 2.93 |
| 407601 | AC002300 | Hs.37129 | sodium channel, nonvoltage-gated 1, beta | 2.02 | 1.55 |
| 441801 | AW242799 | Hs.86366 | ESTs | 2.01 | 10.05 |
| 439780 | AL109688 | | gb: Homo sapiens mRNA full length insert | 2.00 | 10.00 |
| 452732 | BE300078 | Hs.80449 | Homo sapiens , clone IMAGE: 3535294, mRNA, | 2.00 | 1.53 |
| 434876 | AF160477 | Hs.61460 | Ig superfamily receptor LNIR | 2.00 | 1.91 |
| 430152 | AB001325 | Hs.234642 | aquaporin 3 | 1.99 | 1.74 |
| 453134 | AA032211 | Hs.118493 | ESTs | 1.99 | 3.16 |
| 412719 | AW016610 | Hs.816 | ESTs | 1.99 | 0.34 |
| 442577 | AA292998 | Hs.163900 | ESTs | 1.99 | 3.09 |
| 409402 | AF208234 | Hs.695 | cystatin B (stefin B) | 1.98 | 1.50 |
| 414774 | X02419 | Hs.77274 | plasminogen activator, urokinase | 1.97 | 1.84 |
| 439318 | AW837046 | Hs.6527 | G protein-coupled receptor 56 | 1.95 | 1.42 |
| 447334 | AA515032 | Hs.91109 | ESTs | 1.95 | 2.53 |
| 432015 | AL157504 | Hs.159115 | Homo sapiens mRNA; cDNA DKFZp586O0724 (f | 1.94 | 9.70 |
| 429002 | AW248439 | Hs.2340 | junction plakoglobin | 1.94 | 1.57 |
| 410553 | AW016824 | Hs.255527 | hypothetical protein MGC14128 | 1.94 | 2.02 |
| 420783 | AI659838 | Hs.99923 | lectin, galactoside-binding, soluble, 7 | 1.93 | 0.56 |
| 407811 | AW190902 | Hs.40098 | cysteine knot superfamily 1, BMP antagon | 1.92 | 1.01 |
| 448988 | Y09763 | Hs.22785 | gamma-aminobutyric acid (GABA) A recepto | 1.92 | 1.47 |
| 400303 | AA242758 | Hs.79136 | LIV-1 protein, estrogen regulated | 1.92 | 1.59 |
| 414918 | AI219207 | Hs.72222 | hypothetical protein FLJ13459 | 1.92 | 2.77 |
| 424522 | AL134847 | Hs.149957 | ribosomal protein S6 kinase, 90 kD, polyp | 1.92 | 1.21 |
| 413278 | BE563085 | Hs.833 | interferon-stimulated protein, 15 kDa | 1.92 | 1.72 |
| 428928 | BE409838 | Hs.194657 | cadherin 1, type 1, E-cadherin (epitheli | 1.91 | 1.41 |
| 414595 | AA641726 | Hs.289015 | hypothetical protein MGC4171 | 1.90 | 1.61 |
| 400846 | | | sortilin-related receptor, L(DLR class) | 1.90 | 1.93 |
| 417409 | BE272506 | Hs.82109 | syndecan 1 | 1.89 | 1.75 |
| 444781 | NM_014400 | Hs.11950 | GPI-anchored metastasis-associated prote | 1.88 | 1.16 |
| 418867 | D31771 | Hs.89404 | msh (Drosophila) homeo box homolog 2 | 1.88 | 3.09 |
| 419092 | J05581 | Hs.89603 | mucin 1, transmembrane | 1.88 | 1.18 |
| 446673 | NM_016361 | Hs.15871 | LPAP for lysophosphatidic acid phosphata | 1.87 | 2.01 |
| 431347 | AI133461 | Hs.251664 | insulin-like growth factor 2 (somatomedi | 1.86 | 1.87 |
| 430168 | AW968343 | Hs.24255 | DKFZP434I1735 protein | 1.86 | 2.11 |
| 412115 | AK001763 | Hs.73239 | hypothetical protein FLJ10901 | 1.86 | 1.77 |
| 402901 | | | NM_025206*: Homo sapiens hypothetical pro | 1.85 | 2.35 |
| 449027 | AJ271216 | Hs.22880 | dipeptidylpeptidase III | 1.85 | 1.59 |
| 410418 | D31382 | Hs.63325 | transmembrane protease, serine 4 | 1.84 | 1.90 |
| 418870 | AF147204 | Hs.89414 | chemokine (C-X-C motif), receptor 4 (fus | 1.84 | 1.03 |
| 414732 | AW410976 | Hs.77152 | minichromesome maintenance deficient (S. | 1.84 | 1.54 |
| 432210 | AI567421 | Hs.273330 | Homo sapiens , clone IMAGE: 3544662, mRNA, | 1.83 | 1.74 |
| 452934 | AA581322 | Hs.4213 | hypothetical protein MGC16207 | 1.82 | 1.84 |
| 431630 | NM_002204 | Hs.265829 | integrin, alpha 3 (antigen CD49C, alpha | 1.82 | 1.83 |
| 427239 | BE270447 | Hs.174070 | ubiquitin carrier protein | 1.82 | 1.74 |
| 402424 | | | NM_024901: Homo sapiens hypothetical prot | 1.81 | 1.61 |
| 418068 | AW971155 | Hs.293902 | ESTs, Weakly similar to ISHUSS protein d | 1.81 | 3.67 |
| 431846 | BE019924 | Hs.271580 | uroplakin 1B | 1.80 | 4.11 |
| 410153 | BE311926 | Hs.15830 | hypothetical protein FLJ12691 | 1.80 | 9.00 |
| 408522 | AI541214 | Hs.46320 | Small proline-rich protein SPRK [human, | 1.80 | 1.02 |
| 428330 | L22524 | Hs.2256 | matrix metalloproteinase 7 (matrilysin, | 1.80 | 2.26 |
| 451541 | BE279383 | Hs.26557 | plakophilin 3 | 1.79 | 1.16 |
| 415786 | AW419196 | Hs.257924 | hypothetical protein FLJ13782 | 1.79 | 5.59 |
| 424905 | NM_002497 | Hs.153704 | NIMA (never in mitosis gene a)-related k | 1.79 | 8.95 |
| 425852 | AK001504 | Hs.159651 | death receptor 6, TNF superfamily member | 1.79 | 2.08 |
| 437852 | BE001836 | Hs.256897 | ESTs, Weakly similar to dJ365O12.1 [H. sa | 1.77 | 2.96 |
| 437044 | AL035864 | Hs.69517 | differentially expressed in Fanconi's an | 1.76 | 1.43 |
| 439606 | W79123 | Hs.58561 | G protein-coupled receptor 87 | 1.76 | 8.80 |
| 424098 | AF077374 | Hs.139322 | small proline-rich protein 3 | 1.76 | 0.57 |
| 430890 | X54232 | Hs.2699 | glypican 1 | 1.73 | 1.39 |
| 452862 | AW378065 | Hs.8687 | ESTs | 1.73 | 1.99 |
| 427335 | AA448542 | Hs.251677 | G antigen 7B | 1.73 | 8.65 |
| 425883 | AL137708 | Hs.161031 | Homo sapiens mRNA; cDNA DKFZp434K0322 (f | 1.72 | 2.07 |
| 414907 | X90725 | Hs.77597 | polo (Drosophia)-like kinase | 1.72 | 1.65 |
| 428484 | AF104032 | Hs.184601 | solute carrier family 7 (cationic amino | 1.72 | 1.03 |
| 453883 | AI638516 | Hs.347524 | cofactor required for Sp1 transcriptiona | 1.71 | 1.66 |
| 448993 | AI471630 | Hs.8127 | KIAA0144 gene product | 1.71 | 1.52 |
| 422406 | AF025441 | Hs.116206 | Opa-interacting protein 5 | 1.71 | 5.52 |
| 428664 | AK001666 | Hs.189095 | similar to SALL1 (sal (Drosophila)-like | 1.71 | 8.55 |
| 444342 | NM_014398 | Hs.10887 | similar to lysosome-associated membrane | 1.71 | 8.55 |
| 428227 | AA321649 | Hs.2248 | small inducible cytokine subfamily B (Cy | 1.71 | 8.55 |
| 424735 | U31875 | Hs.272499 | short-chain alcohol dehydrogenase family | 1.71 | 13.98 |
| 447532 | AK000614 | Hs.18791 | hypothetical protein FLJ20607 | 1.70 | 1.84 |
| 414053 | BE391635 | Hs.75725 | transgelin 2 | 1.69 | 1.51 |
| 447342 | AI199268 | Hs.19322 | Homo sapiens , Similar to RIKEN cDNA 2010 | 1.69 | 8.45 |
| 426050 | AF017307 | Hs.166096 | E74-like factor 3 (ets domain transcript | 1.69 | 1.60 |
| 448262 | AW880830 | Hs.186273 | ESTs | 1.67 | 2.07 |
| 452316 | AA298484 | Hs.61265 | ESTs, Moderately similar to G786_HUMAN P | 1.66 | 0.70 |
| 452240 | AI591147 | Hs.61232 | ESTs | 1.66 | 1.23 |
| 417151 | AA194055 | Hs.293858 | ESTs | 1.65 | 2.08 |
| 452461 | N78223 | Hs.108106 | transcription factor | 1.65 | 8.25 |
| 418462 | BE001596 | Hs.85266 | integrin, beta 4 | 1.65 | 1.78 |
| 417900 | BE250127 | Hs.82906 | CDC20 (cell division cycle 20, S. cerevi | 1.64 | 1.59 |
| 438746 | AI885815 | Hs.184727 | Human melanoma-associated antigen p97 (m | 1.64 | 1.13 |
| 423161 | AL049227 | Hs.124776 | downstream of cadherin 6 (by 3.3 kb) | 1.63 | 1.81 |
| 453968 | AA847843 | Hs.62711 | High mobility group (nonhistone chromoso | 1.62 | 1.51 |
| 402777 | | | C1002652*: gi\|544327\|sp\|Q04799\|FMO5_RABIT | 1.62 | 2.33 |
| 436569 | BE439539 | Hs.279837 | glutathione S-transferase M2 (muscle) | 1.62 | 2.18 |
| 417515 | L24203 | Hs.82237 | ataxia-telangiectasia group D-associated | 1.62 | 1.27 |
| 413385 | M34455 | Hs.840 | indoleamine-pyrrole 2,3 dioxygenase | 1.61 | 2.05 |
| 410407 | X66839 | Hs.63287 | carbonic anhydrase IX | 1.60 | 1.78 |
| 450635 | AW403954 | Hs.25237 | mesenchymal stem cell protein DSCD75 | 1.60 | 1.63 |
| 437016 | AU076916 | Hs.5398 | guanine monphosphate synthetase | 1.59 | 1.50 |
| 451982 | F13036 | Hs.27373 | Homo sapiens mRNA; cDNA DKFZp564O1763 (f | 1.58 | 1.92 |
| 422247 | U18244 | Hs.113602 | solute carrier family 1 (high affinity a | 1.57 | 1.79 |
| 408908 | BE296227 | Hs.250822 | serine/threonine kinase 15 | 1.56 | 7.80 |
| 433159 | AB035898 | Hs.150587 | kinesin-like protein 2 | 1.56 | 7.80 |
| 443211 | AI128388 | Hs.143655 | ESTs | 1.56 | 7.80 |
| 409893 | AW247090 | Hs.57101 | minichromosome maintenance deficient (S. | 1.55 | 1.44 |
| 426900 | AW163564 | Hs.142375 | ESTs | 1.54 | 1.93 |
| 421066 | AU076725 | Hs.101408 | branched chain aminotransferase 2, mitoc | 1.54 | 1.71 |
| 413804 | T64682 | | gb: yc48b02.r1 Stratagene liver (937224) | 1.53 | 1.55 |
| 418641 | BE243136 | Hs.86947 | a disintegrin and metalloproteinase doma | 1.53 | 1.59 |
| 444783 | AK001468 | Hs.62180 | anillin (Drosophila Scraps homolog), act | 1.52 | 7.60 |
| 414035 | Y00630 | Hs.75716 | serine (or cysteine) proteinase inhibito | 1.49 | 0.52 |
| 418543 | NM_005329 | Hs.85962 | hyaluronan synthase 3 | 1.48 | 1.54 |
| 429211 | AF052693 | Hs.198249 | gap junction protein, beta 5 (connexin 3 | 1.48 | 1.39 |
| 402260 | | | NM_001436*: Homo sapiens fibrillarin (FBL | 1.47 | 1.48 |
| 424264 | D80400 | Hs.239388 | Human DNA sequence from clone RP1-304B14 | 1.47 | 7.35 |
| 433091 | Y12642 | Hs.3185 | lymphocyte antigen 6 complex, locus D | 1.47 | 1.37 |
| 422164 | NM_014312 | Hs.112377 | cortic al thymocyte receptor (X. laevis | 1.46 | 1.80 |
| 444163 | AI126098 | | gb: qc54g07.x1 Soares_placenta_8to9weeks_{—} | 1.45 | 1.58 |
| 452304 | AA025386 | Hs.61311 | ESTs, Weakly similar to S10590 cysteine | 1.45 | 1.58 |
| 445182 | AW189787 | | ESTs | 1.43 | 7.15 |
| 408930 | AA146721 | Hs.334686 | hypothetical protein FLJ21588 | 1.43 | 1.53 |
| 429359 | W00482 | Hs.2399 | matrix metalloproteinase 14 (membrane-in | 1.43 | 1.34 |
| 406467 | | | Target Exon | 1.42 | 7.10 |
| 424244 | AV647184 | Hs.143601 | hypothetical protein hCLA-iso | 1.42 | 1.32 |
| 422094 | AF129535 | Hs.272027 | F-box only protein 5 | 1.41 | 4.55 |
| 431322 | AW970622 | | gb: EST382704 MAGE resequences, MAGK Homo | 1.39 | 10.36 |
| 401760 | | | Target Exon | 1.37 | 1.16 |
| 425247 | NM_005940 | Hs.155324 | matrix metalloproteinase 11 (stromelysin | 1.36 | 1.39 |
| 424420 | BE614743 | Hs.146688 | prostaglandin E synthase | 1.33 | 1.49 |
| 421817 | AF146074 | Hs.108660 | ATP-binding cassette, sub-family C (CFTR | 1.31 | 1.44 |
| 422119 | AI277829 | Hs.111862 | KIAA0590 gene product | 1.31 | 1.22 |
| 418729 | AB028449 | Hs.87889 | helicase-moi | 1.30 | 0.84 |
| 418399 | AF131781 | Hs.84753 | hypothetical protein FLJ12442 | 1.30 | 1.32 |
| 453028 | AB006532 | Hs.31442 | RecQ protein-like 4 | 1.29 | 1.42 |
| 431369 | BE184455 | Hs.251754 | secretory leukocyte protease inhibitor ( | 1.29 | 0.61 |
| 453321 | AI984381 | Hs.232521 | ESTs | 1.27 | 6.35 |
| 421478 | AI683243 | Hs.97258 | ESTs, Moderately similar to S29539 ribos | 1.26 | 6.30 |
| 425726 | AF085808 | Hs.159330 | uroplakin 3 | 1.26 | 2.26 |
| 406906 | Z25424 | | gb: H. sapiens protein-serine/threonine ki | 1.26 | 1.11 |
| 429413 | NM_014058 | Hs.201877 | DESC1 protein | 1.25 | 1.01 |
| 418678 | NM_001327 | Hs.87225 | cancer/testis antigen (NY-ESO-1) | 1.23 | 1.17 |
| 431840 | AA534908 | Hs.2860 | POU domain, class 5, transcription facto | 1.22 | 1.59 |
| 417433 | BE270266 | Hs.82128 | 5T4 oncofetal trophoblast glycoprotein | 1.20 | 1.38 |
| 422397 | AJ223366 | Hs.116051 | Homo sapiens cDNA: FLJ22495 fis, clone H | 1.19 | 1.23 |
| 403903 | | | C5001632*: gi\|10645308\|gb\|AAG21430.1\|AC00 | 1.19 | 1.98 |
| 425721 | AC002115 | Hs.159309 | uroplakin 1A | 1.17 | 2.30 |
| 413943 | AW294416 | Hs.144687 | Homo sapiens cDNA FLJ12981 fis, clone NT | 1.17 | 5.85 |
| 431515 | NM_012152 | Hs.258583 | endothelial differentiation; lysophospha | 1.17 | 1.39 |
| 443859 | NM_013409 | Hs.9914 | follistatin | 1.17 | 1.17 |
| 419743 | AW408762 | Hs.5957 | Homo sapiens clone 24416 mRNA sequence | 1.13 | 2.83 |
| 422330 | D30783 | Hs.115263 | epiregulin | 1.13 | 5.65 |
| 420281 | AI623693 | Hs.323494 | Predicted cation efflux pump | 1.11 | 5.55 |
| 424717 | H03754 | Hs.152213 | wingless-type MMTV integration site fami | 1.08 | 5.40 |
| 440304 | BE159984 | Hs.125395 | ESTs | 1.06 | 5.30 |
| 422170 | AI791949 | Hs.112432 | anti-Mullerian hormone | 1.06 | 1.55 |
| 417599 | AA204688 | Hs.62954 | ESTs | 1.05 | 1.02 |
| 411874 | AA096106 | Hs.20403 | ESTs | 1.04 | 7.20 |
| 449961 | AW265634 | Hs.133100 | ESTs | 1.03 | 0.65 |
| 418506 | AA084248 | Hs.85339 | G protein-coupled receptor 39 | 1.03 | 0.92 |
| 432239 | X81334 | Hs.2936 | matrix metalloproteinase 13 (collagenase | 1.02 | 5.10 |
| 453216 | AL137566 | Hs.32405 | Homo sapiens mRNA; cDNA DKFZp586G0321 (f | 1.02 | 0.60 |
| 423634 | AW959908 | Hs.1690 | heparin-binding growth factor binding pr | 1.00 | 0.05 |
| 423017 | AW178761 | Hs.227948 | serine (or cysteine) proteinase inhibito | 1.00 | 0.25 |
| 453365 | AA035211 | Hs.17404 | SOX7 SRY (sex determining region Y)-box | 1.00 | 0.25 |
| 439239 | AI031540 | Hs.235331 | ESTs | 1.00 | 0.27 |
| 450684 | AA872605 | Hs.25333 | interleukin 1 receptor, type II | 1.00 | 0.45 |
| 425650 | NM_001944 | Hs.1925 | desmoglein 3 (pemphigus vulgaris antigen | 1.00 | 0.72 |
| 404403 | | | Target Exon | 1.00 | 1.00 |
| 406974 | M57293 | | gb: Human parathyroid hormone-related pep | 1.00 | 1.00 |
| 410348 | AW182663 | Hs.95469 | ESTs | 1.00 | 1.00 |
| 412661 | N32860 | Hs.24611 | ESTs, Weakly similar to I54374 gene NF2 | 1.00 | 1.00 |
| 419121 | AA374372 | Hs.89626 | parathyoid hormone-like hormone | 1.00 | 1.00 |
| 426320 | W47595 | Hs.169300 | transforming growth factor, beta 2 | 1.00 | 1.00 |
| 426968 | U07616 | Hs.173034 | amphiphysin (Stiff-Mann syndrome with br | 1.00 | 1.00 |
| 432097 | X51730 | Hs.2905 | progesterone receptor | 1.00 | 1.00 |
| 452401 | NM_007115 | Hs.29352 | tumor necrosis factor, alpha-induced pro | 1.00 | 1.00 |
| 453389 | BE273648 | Hs.32963 | cadherin 6, type 2, K-cadherin (fetal ki | 1.00 | 1.00 |
| 419078 | M93119 | Hs.89584 | insulinoma-associated 1 | 1.00 | 1.25 |
| 430378 | Z29572 | Hs.2556 | tumor necrosis factor receptor superfami | 1.00 | 1.35 |
| 428182 | BE386042 | Hs.293317 | ESTs, Weakly similar to GGC1_HUMAN G ANT | 1.00 | 1.75 |
| 451844 | T61430 | | gb: yc06a03.s1 Stratagene lung (937210) H | 1.00 | 1.80 |
| 415178 | D80503 | Hs.322850 | ESTs | 1.00 | 2.20 |
| 410044 | BE566742 | Hs.58169 | highly expressed in cancer, rich in leuc | 1.00 | 2.25 |
| 425048 | H05468 | Hs.164502 | ESTs | 1.00 | 2.25 |
| 422956 | BE545072 | Hs.122579 | ECT2 protein (Epithelial cell transformi | 1.00 | 2.60 |
| 449448 | D60730 | Hs.57471 | ESTs | 1.00 | 2.70 |
| 417791 | AW965339 | Hs.111471 | ESTs | 1.00 | 2.95 |
| 421373 | AA608229 | Hs.167771 | ESTs | 1.00 | 3.00 |
| 427356 | AW023482 | Hs.97849 | ESTs | 1.00 | 3.15 |
| 421070 | AA283185 | Hs.19327 | ESTs | 1.00 | 3.25 |
| 415542 | R13474 | Hs.290263 | ESTs, Weakly similar to I38022 hypotheti | 1.00 | 3.35 |
| 429486 | AF155827 | Hs.203963 | hypothetical protein FLJ10339 | 1.00 | 3.55 |
| 402075 | | | ENSP00000251056*: Plasma membrane calcium | 1.00 | 3.95 |
| 419559 | Y07828 | Hs.91096 | ring finger protein | 1.00 | 4.00 |
| 416661 | AA634543 | Hs.79440 | IGF-II mRNA-binding protein 3 | 1.00 | 4.00 |
| 418738 | AW388633 | Hs.6682 | solute carrier family 7, (cationic amino | 1.00 | 4.35 |
| 412723 | AA648459 | Hs.335951 | hypothetical protein AF301222 | 1.00 | 4.40 |
| 404877 | | | NM_005365: Homo sapiens melanoma antigen, | 1.00 | 4.45 |
| 443054 | AI745185 | Hs.8939 | yes-associated protein 65 kDa | 1.00 | 4.45 |
| 403047 | | | NM_005656*: Homo sapiens transmembrane pr | 1.00 | 4.50 |
| 406434 | | | NM_030579*: Homo sapiens cytochrome b5 ou | 1.00 | 4.65 |
| 412530 | AA766268 | Hs.266273 | hypothetical protein FLJ13346 | 1.00 | 4.65 |
| 433365 | AF026944 | Hs.293797 | ESTs | 1.00 | 10.05 |
| 427666 | AI791495 | Hs.180142 | calmodulin-like skin protein (CLSP) | 0.99 | 0.60 |
| 429504 | X99133 | Hs.204238 | lipocalin 2 (oncogene 24p3) | 0.99 | 1.00 |
| 431474 | AL133990 | Hs.190642 | CEGP1 protein | 0.94 | 9.14 |
| 411880 | AW872477 | | gb: hm30f03.x1 NCI_CGAP_Thy4 Homo sapiens | 0.93 | 21.15 |
| 414221 | AW450979 | | gb: UI-H-BI3-ala-a-12-0-UI.s1 NCI_CGAP_Su | 0.91 | 2.60 |
| 444649 | AW207523 | Hs.197628 | ESTs | 0.89 | 11.15 |
| 456034 | AW450979 | | gb: UI-H-BI3-ala-a-12-0-UI.s1 NCI_CGAP_Su | 0.89 | 5.13 |
| 414521 | D28124 | Hs.76307 | neuroblastoma, suppression of tumorigeni | 0.84 | 0.85 |
| 439569 | AW602166 | Hs.222399 | CEGP1 protein | 0.84 | 2.42 |
| 432222 | AI204995 | | gb: an03c03.x1 Stratagene schizo brain S1 | 0.81 | 6.75 |
| 407846 | AA426202 | Hs.40403 | Cbp/p300-interacting transactivator, wit | 0.80 | 0.57 |
| 457292 | AI921270 | Hs.281462 | hypothetical protein FLJ14251 | 0.77 | 1.40 |
| 431089 | BE041395 | | ESTs, Weakly similar to unknown protein | 0.76 | 14.88 |
| 459702 | AI204995 | | gb: an03c03.x1 Stratagene schizo brain S1 | 0.74 | 11.03 |
| 424503 | NM_002205 | Hs.149609 | integrin, alpha 5 (fibronectin receptor, | 0.56 | 0.80 |
| 406964 | M21305 | | gb: Human alpha satellite and satellite 3 | 0.53 | 11.16 |
| 416225 | AA577730 | Hs.188684 | ESTs, Weakly similar to PC4259 ferritin | 0.48 | 3.01 |
| 400288 | X06256 | Hs.149609 | integrin, alpha 5 (fibronectin receptor, | 0.40 | 0.70 |
| 421218 | NM_000499 | Hs.72912 | cytochrome P450, subfamily I (aromatic c | 0.40 | 0.61 |

Pkey: Unique Eos probeset identifier number
ExAccn: Exemplar Accession number, Genbank accession number
UnigeneID: Unigene number
Unigene Title: Unigene gene title
R1: 90th percentile of bladder tumor Als divided by the 90th percentile of normal bladder sample Als
R2: 90th percentile of bladder tumor Als divided by the 90th percentile of normal body sample Als

[0368] TABLE 3B

| Pkey | CAT Number | Accession |
|---|---|---|
| 411880 | 1263110_1 | AW872477 BE088101 T05990 |
| 413804 | 1390710_1 | T64682 BE168190 BE168256 |
| 414221 | 142696_1 | AW450979 AA136653 AA136656 AW419381 AA984358 AA492073 BE168945 AA809054 AW238038 |
| | | BE011212 BE011359 BE011367 BE011368 BE011362 BE011215 BE011365 BE011363 |
| 415989 | 156454_1 | AI267700 AI720344 AA191424 AI023543 AI469633 AA172056 AW958465 AA172236 AW953397 |
| | | AA355086 |
| 431089 | 327825_1 | BE041395 AA491826 AA621946 AA715980 AA666102 |
| 431322 | 331543_1 | AW970622 AA503009 AA502998 AA502989 AA502805 T92188 |
| 432222 | 343347_1 | AI204995 AW827539 AW969908 AW440776 AA528756 |
| 436608 | 42361_3 | AA628980 AI126603 BE504035 |
| 439780 | 47673_1 | AL109688 R23665 R26578 |
| 444163 | 593658_1 | AI126098 AI184746 AI148521 |
| 445182 | 632151_1 | AW189787 AI215430 AW268499 AW205930 AI392907 BE093017 BE093019 BE093010 |
| 451844 | 888230_1 | T61430 AI820546 AI821336 |
| 456034 | 142696_1 | AW450979 AA136653 AA136656 AW419381 AA984358 AA492073 BE168945 AA809054 AW238038 |
| | | BE011212 BE011359 BE011367 BE011368 BE011362 BE011215 BE011365 BE011363 |

Pkey: Unique Eos probeset identifier number
CAT number: Gene cluster number
Accession: Genbank accession numbers

[0369] TABLE 3C

| Pkey | Ref | Strand | Nt_position |
|---|---|---|---|
| 400773 | 8131629 | Minus | 44116-44238, 48208-48321 |
| 400843 | 9188605 | Plus | 5863-5970, 7653-7784, 8892-9023, 9673-9807, 10634-10789, 15254-15403, 23827-23958 |
| 400844 | 9188605 | Plus | 24746-24872, 25035-25204 |
| 400845 | 9188605 | Plus | 34428-34612 |
| 400846 | 9188605 | Plus | 39310-39474 |
| 401093 | 8516137 | Minus | 22335-23166 |
| 401747 | 9789672 | Minus | 118596-118816, 119119-119244, 119609-119761, 120422-120990, 130161-130381, |
| | | | 130468-130593, 131097-131258, 131866-131932, 132451-132575, 133580-134011 |
| 401760 | 9929699 | Plus | 83126-83250, 85320-85540, 94719-95287 |
| 401780 | 7249190 | Minus | 28397-28617, 28920-29045, 29135-29296, 29411-29567, 29705-29787, 30224-30573 |
| 401781 | 7249190 | Minus | 83215-83435, 83531-83656, 83740-83901, 84237-84393, 84955-85037, 86290-86814 |
| 402075 | 8117407 | Plus | 121907-122035, 122804-122921, 124019-124161, 124455-124610, 125672-126076 |
| 402230 | 9966312 | Minus | 29782-29932 |
| 402239 | 7690131 | Plus | 38175-38304, 42133-42266 |
| 402260 | 3399665 | Minus | 113765-113910, 115653-115765, 116808-116940 |
| 402305 | 7328724 | Plus | 40832-41362 |
| 402424 | 9796344 | Minus | 64925-65073 |
| 402777 | 9588235 | Plus | 126786-126948 |
| 402901 | 8894222 | Minus | 175426-175667 |
| 403047 | 3540153 | Minus | 59793-59968 |
| 403381 | 9438267 | Minus | 26009-26178 |
| 403903 | 7710671 | Minus | 101165-102597 |
| 404403 | 7272157 | Minus | 72053-72238 |
| 404440 | 7528051 | Plus | 80430-81581 |
| 404875 | 9801324 | Plus | 96588-96732, 97722-97831 |
| 404877 | 1519284 | Plus | 1095-2107 |
| 404977 | 3738341 | Minus | 43081-43229 |
| 405033 | 7107731 | Minus | 142358-142546 |
| 405932 | 7767812 | Minus | 123525-123713 |
| 406081 | 9123861 | Minus | 38115-38691 |
| 406399 | 9256288 | Minus | 63448-63554 |
| 406434 | 9256651 | Minus | 17803-17931 |
| 406467 | 9795551 | Plus | 182212-182958 |

Pkey: Unique number corresponding to an Eos probeset
Ref: Sequence source. The 7 digit numbers in this column are Genbank Identifier (GI) numbers. “Dunham I. et al.” refers to the publication entitled “The DNA sequence of human chromosome 22.” Dunham I. et al., Nature (1999) 402: 489-495.
Strand: Indicates DNA strand from which exons were predicted.
Nt_position: Indicates nucleotide positions of predicted exons.

[0370] TABLE 4A
Preferred diagnostics for bladder cancer

| Pkey | ExAccn | UnigeneID | Unigene Title | R1 | R2 | R3 |
|---|---|---|---|---|---|---|
| 423961 | D13666 | Hs.136348 | periostin (OSF-2os) | 11.22 | 1.40 | 1.44 |
| 446619 | AU076643 | Hs.313 | secreted phosphoprotein 1 (osteopontin, | 8.40 | 1.31 | 1.38 |
| 444381 | BE387335 | Hs.283713 | ESTs, Weakly similar to S64054 hypotheti | 7.88 | 2.06 | 2.44 |
| 408243 | Y00787 | Hs.624 | interleukin 8 | 7.54 | 2.86 | 4.85 |
| 413063 | AL035737 | Hs.75184 | chilinase 3-like 1 (cartilage glycoprote | 6.14 | 1.18 | 1.18 |
| 414020 | NM_002984 | Hs.75703 | small inducible cytokine A4 (homologous | 5.32 | 1.34 | 1.36 |
| 424247 | X14008 | Hs.234734 | Iysozyme (renal amyloidosis) | 5.27 | 0.61 | 0.57 |
| 418007 | M13509 | Hs.83169 | matrix metalloproteinase 1 (interstitial | 5.17 | 7.47 | 35.60 |
| 422158 | L10343 | Hs.112341 | protease inhibitor 3, skin-derived (SKAL | 4.30 | 1.75 | 1.54 |
| 446921 | AB012113 | Hs.16530 | small inducible cytokine subfamily A (Cy | 4.29 | 1.35 | 1.60 |
| 413324 | V00571 | Hs.75294 | corticotropin releasing hormone | 4.20 | 6.27 | 45.75 |
| 412429 | AV650262 | Hs.75765 | GRO2 oncogene | 4.00 | 0.94 | 0.93 |
| 406636 | L12064 | | gb: Homo sapiens (clone WR4.12VL)anti-th | 3.66 | 1.25 | 1.25 |
| 428330 | L22524 | Hs.2256 | matrix metalloproteinase 7 (matrilysin, | 3.58 | 2.07 | 2.26 |
| 406687 | M31126 | | matrix metalloproteinase 11 (stromelysin | 3.41 | 4.37 | 3.37 |
| 422550 | BE297626 | Hs.296049 | microfibrillar-associated protein 4 | 3.09 | 0.39 | 0.40 |
| 410867 | X63556 | Hs.750 | fibrillin 1 (Marfan syndrome) | 2.96 | 0.44 | 0.45 |
| 416658 | U03272 | Hs.79432 | fibrillin 2 (congenital contractural ara | 2.90 | 1.94 | 3.46 |
| 414812 | X72755 | Hs.77367 | monokine induced by gamma interferon | 2.80 | 1.67 | 3.10 |
| 423673 | BE003054 | Hs.1695 | matrix metalloproteinase 12 (macrophage | 2.77 | 5.62 | 26.07 |
| 421379 | Y15221 | Hs.103982 | small inducible cytokine subfamily B (Cy | 2.71 | 2.26 | 2.91 |
| 429500 | X78565 | Hs.289114 | hexabrachion (tenascin C, cytotactin) | 2.40 | 0.47 | 0.37 |
| 417849 | AW291587 | Hs.82733 | nidogen 2 | 2.34 | 0.88 | 0.86 |
| 400419 | AF084545 | | Target | 2.33 | 1.54 | 2.12 |
| 407811 | AW190902 | Hs.40098 | cysteine knot superfamily 1, BMP antagon | 2.10 | 1.01 | 1.01 |
| 400289 | X07820 | Hs.2258 | matrix metalloproteinase 10 (stromelysin | 1.99 | 3.19 | 17.50 |
| 414774 | X02419 | Hs.77274 | plasminogen activator, urokinase | 1.94 | 2.49 | 1.84 |
| 409420 | Z15008 | Hs.54451 | laminin, gamma 2 (nicein (100 kD), kalini | 1.94 | 2.02 | 5.39 |
| 428227 | AA321649 | Hs.2248 | small inducible cytokine subfamily B (Cy | 1.84 | 1.99 | 8.55 |
| 414476 | AA301867 | Hs.76224 | EGF-containing fibulin-like extracellula | 1.76 | 0.33 | 0.31 |
| 431639 | AK000680 | Hs.266175 | phosphoprotein associated with GEMs | 1.76 | 1.13 | 1.16 |
| 421958 | AA357185 | Hs.109918 | ras homolog gene family, member H | 1.75 | 1.33 | 1.27 |
| 425247 | NM_005940 | Hs.155324 | matrix metalloproteinase 11 (stromelysin | 1.58 | 2.42 | 1.39 |
| 444342 | NM_014398 | Hs.10887 | similar to lysosome-associated membrane | 1.57 | 2.02 | 8.55 |
| 421493 | BE300341 | Hs.104925 | ectodermal-neural cortex (with BTB-like | 1.55 | 1.57 | 1.55 |
| 407939 | W05608 | Hs.312679 | ESTs, Weakly similar to A49019 dynein he | 1.41 | 0.79 | 0.67 |
| 429344 | R94038 | Hs.199538 | inhibin, beta C | 1.36 | 1.39 | 1.34 |
| 402727 | | | NM_025065: Homo sapiens hypothetical prot | 1.34 | 1.34 | 1.56 |
| 412420 | AL035668 | Hs.73853 | bone morphogenetic protein 2 | 1.31 | 1.63 | 2.22 |
| 423217 | NM_000094 | Hs.1640 | collagen, type VII, alpha 1 (epidermolys | 1.27 | 2.00 | 1.67 |
| 424206 | NM_003734 | Hs.198241 | amine oxidase, copper containing 3 (vasc | 1.25 | 0.16 | 0.30 |
| 415138 | C18356 | Hs.295944 | tissue factor pathway inhibitor 2 | 1.23 | 1.70 | 4.34 |
| 424479 | AF064238 | Hs.149098 | smoothelin | 1.19 | 0.27 | 0.47 |
| 445537 | AJ245671 | Hs.12844 | EGF-like-domain, multiple 6 | 1.17 | 1.59 | 2.93 |
| 417079 | U65590 | Hs.81134 | interleukin 1 receptor antagonist | 1.16 | 0.82 | 0.80 |
| 421634 | AA437414 | Hs.106283 | hypothetical protein FLJ10262 | 1.16 | 1.05 | 1.05 |
| 439569 | AW602166 | Hs.222399 | CEGP1 protein | 1.15 | 2.01 | 2.42 |
| 431346 | AA371059 | Hs.251636 | ubiquitin specific protease 3 | 1.10 | 1.64 | 1.52 |
| 448901 | AK001021 | Hs.22505 | hypothetical protein FLJ10159 | 1.10 | 0.31 | 0.31 |
| 450983 | AA305384 | Hs.25740 | ERO1 (S. cerevisiae)-like | 1.03 | 1.51 | 1.42 |
| 422424 | AI186431 | Hs.296638 | prostate differentiation factor | 1.02 | 2.77 | 2.68 |
| 458781 | AI444821 | Hs.63085 | ESTs, Weakly similar to MPP3_HUMAN MAGUK | 1.00 | 1.64 | 5.45 |
| 445413 | AA151342 | Hs.12677 | CGI-147 protein | 1.00 | 1.51 | 5.20 |
| 432350 | NM_005865 | Hs.274407 | protease, serine, 16 (thymus) | 1.00 | 1.55 | 4.30 |
| 403106 | | | C8000064*: gi\|10432393\|emb\|CAC10283.1\| (A | 1.00 | 1.48 | 4.24 |
| 402075 | | | ENSP00000251056*: Plasma membrane calcium | 1.00 | 1.67 | 3.95 |
| 404860 | | | C1003394*: gi\|12314272\|emb\|CAC00591.1\| (A | 1.00 | 1.40 | 3.90 |
| 434037 | AF116601 | | WW domain-containing oxidoreductase | 1.00 | 1.58 | 3.70 |
| 405738 | | | CX000390*: gi\|6014646\|gb\|AAF01438.1\|AF187 | 1.00 | 1.36 | 2.95 |
| 427585 | D31152 | Hs.179729 | collagen, type X, alpha 1 (Schmid metaph | 1.00 | 1.45 | 1.60 |
| 439898 | AW505514 | Hs.209561 | KIAA1715 protein | 1.00 | 1.28 | 1.59 |
| 452567 | D87120 | Hs.29882 | predicted osteoblast protein | 1.00 | 1.10 | 1.31 |
| 401271 | | | C9000559*: gi\|12314195\|emb\|CAB99338.1\| (A | 1.00 | 2.12 | 1.00 |
| 411339 | BE164598 | Hs.274251 | hypothetical protein FLJ20375; KIAA1797 | 1.00 | 2.05 | 1.00 |
| 403005 | | | C21000027*: gi\|1817556\|dbj\|BAA13672.1\| (D | 1.00 | 1.89 | 1.00 |
| 431146 | Z83850 | | Human DNA sequence from PAC 82J11 and co | 1.00 | 1.89 | 1.00 |
| 434939 | AF161422 | Hs.306567 | Homo sapiens HSPC304 mRNA, partial cds | 1.00 | 1.86 | 1.00 |
| 431753 | X76029 | Hs.2841 | neuromedin U | 1.00 | 1.82 | 1.00 |
| 419121 | AA374372 | Hs.89626 | parathyroid hormone-like hormone | 1.00 | 1.69 | 1.00 |
| 435505 | AF200492 | Hs.211238 | interleukin-1 homolog 1 | 1.00 | 1.67 | 1.00 |
| 452401 | NM_007115 | Hs.29352 | tumor necrosis factor, alpha-induced pro | 1.00 | 1.67 | 1.00 |
| 406397 | | | C16001447*: gi\|12053709\|emb\|CAC20419.1\| ( | 1.00 | 1.66 | 1.00 |
| 404488 | | | NM_030958*: Homo sapiens organic anion tr | 1.00 | 1.56 | 1.00 |
| 441206 | BE552314 | Hs.131823 | ESTs, Weakly similar to TERA HUMAN [H. sa | 1.00 | 1.49 | 1.00 |
| 407853 | AA336797 | Hs.40499 | dickkopf (Xanopus laevis ) homolog 1 | 1.00 | 1.47 | 1.00 |
| 446119 | D29527 | Hs.290931 | ESTs | 1.00 | 1.47 | 1.00 |
| 406471 | | | Target Exon | 1.00 | 1.44 | 1.00 |
| 402110 | | | C18000178: gi\|11990779\|emb\|CAC19649.1\| (A | 1.00 | 1.42 | 1.00 |
| 407911 | AF104922 | Hs.41565 | growth differentiation factor 8 | 1.00 | 1.40 | 1.00 |
| 404829 | | | C1002937*: gi\|7499208\|pir∥T20993 hypothe | 1.00 | 1.37 | 1.00 |
| 421925 | S80310 | Hs.109620 | acidic epididymal glycoprotein-like 1 | 1.00 | 1.26 | 1.00 |
| 406076 | AL390179 | | Homo sapiens mRNA; cDNA DKFZp547P134 (fr | 1.00 | 1.19 | 1.00 |
| 458622 | AA972412 | Hs.13755 | f-box and WD-40 domain protein 2 | 1.00 | 1.09 | 1.00 |
| 416018 | AW138239 | Hs.78977 | proprotein convertase subtilisin/kexin t | 1.00 | 1.04 | 1.00 |
| 409357 | M73628 | Hs.54415 | casein, kappa | 1.00 | 1.03 | 1.00 |
| 436684 | AW976319 | Hs.94806 | ATP-binding cassette, sub-family A (ABC1 | 1.00 | 0.84 | 0.84 |
| 436178 | BE152396 | Hs.21590 | hypothetical protein DKFZp564O0523 | 1.00 | 0.91 | 0.80 |
| 402522 | | | C1000568*: gi\|12697965\|dbj\|BAB21801.1\| (A | 1.00 | 0.80 | 0.67 |
| 405735 | | | ENSP00000252164*: KIAA1578 protein (Fragm | 1.00 | 0.86 | 0.56 |
| 401905 | | | ENSP00000252232*: Sterol regulatory eleme | 1.00 | 0.65 | 0.52 |
| 404152 | | | C6000931*: gi\|9558454\|dbj\|BAB03398.1\| (AB | 1.00 | 0.58 | 0.51 |
| 418693 | AI750878 | Hs.87409 | thrombospondin 1 | 1.00 | 0.85 | 0.51 |
| 451375 | AI792066 | Hs.283902 | Homo sapiens BAC clone RP11-481J13 from | 1.00 | 0.46 | 0.38 |
| 430132 | AA204686 | Hs.234149 | hypothetical protein FLJ20647 | 1.00 | 0.84 | 0.33 |
| 456983 | AI081687 | Hs.11355 | thymopoietin | 1.00 | 0.61 | 0.29 |
| 438681 | AW384815 | Hs.149208 | KIAA1555 protein | 1.00 | 0.60 | 0.28 |
| 409038 | T97490 | Hs.50002 | small inducible cytokine subfamily A (Cy | 1.00 | 0.39 | 0.19 |
| 409196 | NM_001874 | Hs.334873 | carboxypeptidase M | 1.00 | 0.43 | 0.13 |
| 410023 | AB017169 | Hs.57929 | slit (Drosophila) homolog 3 | 1.00 | 0.30 | 0.12 |
| 420674 | NM_000055 | Hs.1327 | butyrylcholinesterase | 1.00 | 0.30 | 0.08 |
| 415165 | AW887604 | Hs.78065 | complement component 7 | 1.00 | 0.08 | 0.06 |
| 425545 | N98529 | Hs.158295 | Homo sapiens , clone MGC: 12401, mRNA, com | 1.00 | 0.10 | 0.01 |
| 448256 | BE614149 | Hs.20814 | CGI-27 protein | 0.96 | 1.32 | 1.55 |
| 417389 | BE260964 | Hs.82045 | midkine (neurite growth-promoting factor | 0.95 | 3.15 | 2.34 |
| 403214 | | | NM_016232*: Homo sapiens interleukin 1 re | 0.94 | 1.63 | 2.51 |
| 414799 | AI752416 | Hs.77326 | insulin-like growth factor binding prote | 0.92 | 1.87 | 1.60 |
| 406665 | U22961 | Hs.184411 | albumin | 0.92 | 1.09 | 1.03 |
| 401519 | | | C15000476*: gi\|12737279\|ref\|XP_012163.1\| | 0.88 | 1.46 | 3.44 |
| 417501 | AL041219 | Hs.82222 | sema domain, immunoglobulin domain (Ig), | 0.87 | 0.41 | 0.50 |
| 409632 | W74001 | Hs.55279 | serine (or cysteine) proteinase inhibito | 0.85 | 1.38 | 1.43 |
| 405494 | | | C2001837*: gi\|12697903\|dbj\|BAB21770.1\| (A | 0.83 | 1.46 | 4.65 |
| 444171 | AB018249 | Hs.10458 | small inducible cytokine subfamily A (Cy | 0.80 | 0.91 | 0.91 |
| 439706 | AW872527 | Hs.59761 | ESTs, Weakly similar to DAP1_HUMAN DEATH | 0.79 | 0.58 | 0.43 |
| 436396 | AI683487 | Hs.152213 | wingless-type MMTV integration site fami | 0.77 | 1.47 | 2.37 |
| 426716 | NM_006379 | Hs.171921 | sema domain, immunoglobulin domain (Ig), | 0.75 | 1.13 | 1.18 |
| 431347 | AI133461 | Hs.251664 | insulin-like growth factor 2 (somatomedi | 0.68 | 2.61 | 1.87 |
| 413753 | U17760 | Hs.75517 | laminin, beta 3 (nicein (125 kD), kalinin | 0.68 | 2.70 | 4.96 |
| 426322 | J05068 | Hs.2012 | transcobalamin I (vitamin B12 binding pr | 0.67 | 1.50 | 1.36 |
| 426514 | BE616633 | Hs.170195 | bone morphogenetic protein 7 (osteogenic | 0.56 | 2.05 | 2.46 |
| 422282 | AF019225 | Hs.114309 | apolipoprotein L | 0.55 | 3.91 | 3.92 |
| 409757 | NM_001898 | Hs.123114 | cystatin SN | 0.53 | 2.72 | 2.93 |
| 427450 | AB014526 | Hs.178121 | KIAA0626 gene product | 0.52 | 1.34 | 1.97 |
| 414555 | N98569 | Hs.76422 | phospholipase A2, group IIA (platelets, | 0.50 | 1.04 | 1.05 |
| 423774 | L39064 | Hs.1702 | interleukin 9 receptor | 0.49 | 2.81 | 6.46 |
| 404977 | | | Insulin-like growth factor 2 (somatomedi | 0.28 | 5.78 | 5.17 |
| 428336 | AA503115 | Hs.183752 | microseminoprotein, beta- | 0.21 | 1.47 | 1.56 |
| 451668 | Z43948 | Hs.326444 | cartilage acidic protein 1 | 0.18 | 4.05 | 3.60 |
| 428651 | AF196478 | Hs.188401 | annexin A10 | 0.17 | 5.14 | 27.75 |
| 421110 | AJ250717 | Hs.1355 | cathepsin E | 0.12 | 5.49 | 45.35 |

Pkey: Unique Eos probeset identifier number
ExAccn: Exemplar Accession number, Genbank accession number
UnigeneID: Unigene number
Unigene Title: Unigene gene title
R1: 80th percentile of muscle-invasive bladder tumor (stage T2-T4) Als divided by the 80th percentile of exophytic non-invasive carcinoma (stage Ta) Ais
R2 90th percentile of bladder tumor Als minus background divided by 90th percentile of normal body sample Als minus background, where background equals the 15th percentile of all sample Als
R3 90th percentile of bladder tumor Als divided by the 90th percentile of normal body sample Als

[0371] TABLE 4B

| Pkey | CAT Number | Accession |
|---|---|---|
| 431146 | 32854_1 | Z83850 AA459717 AW965384 AA333635 |
| 434037 | 37918_1 | AF116601 AI110691 AF063566 |

Pkey: Unique Eos probeset identifier number
CAT number: Gene cluster number
Accession: Genbank accession numbers

[0372] TABLE 4C

| Pkey | Ref | Strand | Nt_position |
|---|---|---|---|
| 401271 | 9797373 | Minus | 61292-61911 |
| 401519 | 6649315 | Plus | 157315-157950 |
| 401905 | 8671966 | Plus | 153965-154441, 156599-156819 |
| 402075 | 8117407 | Plus | 121907-122035, 122804-122921, |
| | | | 124019-124161, 124455-124610, |
| | | | 125672-126076 |
| 402110 | 8131678 | Minus | 173889-174062 |
| 402522 | 9798493 | Plus | 20605-20731 |
| 402727 | 9211324 | Plus | 54596-54777 |
| 403005 | 5791501 | Minus | 16945-17053, 20018-20403 |
| 403106 | 7331404 | Plus | 77162-77350, 81338-81511 |
| 403214 | 7630945 | Minus | 76723-77027, 79317-79484 |
| 404152 | 9884757 | Plus | 41111-41281, 45495-45716, |
| | | | 47801-47910 |
| 404488 | 8113286 | Minus | 64835-64994 |
| 404829 | 6624702 | Minus | 4913-5093, 7310-7469, 9472-9621, |
| | | | 9951-10082 |
| 404860 | 8979555 | Plus | 65852-66081 |
| 404977 | 3738341 | Minus | 43081-43229 |
| 405494 | 8050952 | Minus | 70284-70518 |
| 405735 | 9931101 | Minus | 29854-29976 |
| 405738 | 9943998 | Plus | 44370-45410 |
| 406076 | 9123123 | Plus | 89972-90319 |
| 406397 | 9256243 | Minus | 127317-127454 |
| 406471 | 9795566 | Plus | 87383-87589 |

Pkey: Unique number corresponding to an Eos probeset
Ref: Sequence source. The 7 digit numbers in this column are Genbank Identifier (GI) numbers. “Dunham I. et al.” refers to the publication entitled “The DNA sequence of human chromosome 22.” Dunham I. et al., Nature (1999) 402: 489-495.
Strand: Indicates DNA strand from which exons were predicted.
Nt_position: Indicates nucleotide positions of predicted exons.

[0373] TABLE 5A
Genes upregulated in bladder cancer

| Pkey | ExAccn | UnigeneID | Unigene Title | R1 |
|---|---|---|---|---|
| 459702 | AI204995 | | gb: an03c03.x1 Stratagene schizo brain S1 | 11.03 |
| 437915 | AI637993 | Hs.202312 | Homo sapiens clone N11 NTera2D1 teratoca | 10.40 |
| 404917 | | | Target Exon | 9.65 |
| 401066 | | | C11000517*: gi\|7293105\|gb\|AAF48490.1\| (AE | 9.00 |
| 447475 | AI380797 | Hs.158992 | ESTs | 8.92 |
| 427335 | AA448542 | Hs.251677 | G antigen 7B | 8.65 |
| 450061 | AI797034 | Hs.346238 | ESTs | 8.35 |
| 401335 | | | Target Exon | 7.95 |
| 424264 | D80400 | Hs.239388 | Human DNA sequence from clone RP1-304B14 | 7.35 |
| 409041 | AB033025 | Hs.50081 | Hypothetical protein, XP_051860 (KIAA119 | 7.20 |
| 436608 | AA628980 | | down syndrome critical region protein DS | 4.86 |
| 451950 | AW292317 | Hs.213307 | ESTs | 4.45 |
| 406542 | | | C19000728*: gi\|12585552\|sp\|Q9Y2Q1\|Z257_HU | 3.73 |
| 437931 | AI249468 | Hs.124434 | ESTs | 3.70 |
| 443133 | AI033878 | Hs.41379 | ESTs | 3.60 |
| 434487 | AF143867 | Hs.337588 | ESTs, Moderately similar to S65657 alpha | 3.37 |
| 402239 | | | Target Exon | 3.37 |
| 443162 | T49951 | Hs.9029 | DKFZP434G032 protein | 3.21 |
| 403383 | | | Target Exon | 3.13 |
| 438315 | R56795 | Hs.82419 | ESTs | 3.04 |
| 452827 | AI571835 | Hs.55468 | ESTs | 3.01 |
| 416225 | AA577730 | Hs.188684 | ESTs, Weakly similar to PC4259 ferritin | 3.01 |
| 402948 | | | NM_025206: Homo sapiens hypothetical prot | 2.91 |
| 429983 | W92620 | Hs.260855 | ESTs | 2.84 |
| 429238 | NM_002849 | Hs.198288 | protein tyrosine phosphatase, receptor t | 2.78 |
| 444371 | BE540274 | Hs.239 | forkhead box M1 | 2.75 |
| 417003 | AL038170 | Hs.80756 | betaine-homocysteine methyltransferase | 2.70 |
| 414906 | AA157911 | Hs.72200 | ESTs | 2.70 |
| 425206 | NM_002153 | Hs.155109 | hydroxysteroid (17-beta) dehydrogenase 2 | 2.68 |
| 422283 | AW411307 | Hs.114311 | CDC45 (cell division cycle 45, S. cerevis | 2.62 |
| 429345 | R11141 | Hs.199695 | hypothetical protein | 2.61 |
| 414221 | AW450979 | | gb: UI-H-BI3-ala-a-12-0-UI.s1 NCI_CGAP_Su | 2.60 |
| 402305 | | | C19000735*: gi\|4508027\|ref\|NP_003414.1\| z | 2.54 |
| 432842 | AW674093 | Hs.334822 | hypothetical protein MGC4485 | 2.51 |
| 427719 | AI393122 | Hs.134726 | ESTs | 2.51 |
| 455797 | BE091833 | | gb: IL2-BT0731-260400-076-F04 BT0731 Homo | 2.50 |
| 414807 | AI738616 | Hs.77348 | hydroxyprostaglandin dehydrogenase 15-(N | 2.49 |
| 456967 | AW004056 | Hs.168357 | T-box 2 | 2.49 |
| 406387 | | | Target Exon | 2.48 |
| 417997 | AA418189 | Hs.23017 | Homo sapiens cDNA: FLJ22747 fis, clone K | 2.48 |
| 415752 | BE314524 | Hs.78776 | putative transmembrane protein | 2.46 |
| 411248 | AA551538 | Hs.334605 | Homo sapiens cDNA FLJ14408 fis, clone HE | 2.43 |
| 434293 | NM_004445 | Hs.3796 | EphB6 | 2.42 |
| 433078 | AW015188 | Hs.121575 | Homo sapiens cDNA FLJ12231 fis, clone MA | 2.40 |
| 425997 | AK000086 | Hs.165948 | hypothetical protein FLJ20079 | 2.38 |
| 418322 | AA284166 | Hs.84113 | cyclin-dependent kinase inhibitor 3 (CDK | 2.35 |
| 452012 | AA307703 | Hs.279766 | kinesin family member 4A | 2.34 |
| 445600 | AF034803 | Hs.12953 | PTPRF interacting protein, binding prote | 2.33 |
| 418941 | AA452970 | Hs.239527 | E1B-55 kDa-associated protein 5 | 2.33 |
| 454609 | AW810204 | | gb: MR4-ST0125-021199-017-d08 ST0125 Homo | 2.28 |
| 444476 | AF020038 | Hs.11223 | isocitrate dehydrogenase 1 (NADP), solub | 2.26 |
| 420005 | AW271106 | Hs.133294 | ESTs | 2.22 |
| 439826 | NM_014965 | Hs.6705 | KIAA1042 protein | 2.22 |
| 405531 | | | Target Exon | 2.21 |
| 436569 | BE439539 | Hs.279837 | glutathione S-transferase M2 (muscle) | 2.18 |
| 404394 | | | ENSP00000241075: TRRAP PROTEIN. | 2.17 |
| 427479 | BE410092 | Hs.178471 | KIAA0798 gene product | 2.17 |
| 435904 | AF261655 | Hs.8910 | 1,2-alpha-mannosidase IC | 2.13 |
| 431620 | AA126109 | Hs.264981 | 2′-5′-oligoadenylate synthetase 2 (69-71 | 2.12 |
| 426682 | AV660038 | Hs.2056 | UDP glycosyltransferase 1 family, polype | 2.10 |
| 422765 | AW409701 | Hs.1578 | baculoviral lAP repeat-containing 5 (sur | 2.10 |
| 451385 | AA017656 | | gb: ze39h01.r1 Soares retina N2b4HR Homo | 2.09 |
| 403477 | | | C3002160*: gi\|7662420\|ref\|NP_055738.1\| KI | 2.09 |
| 417151 | AA194055 | Hs.293858 | ESTs | 2.08 |
| 448262 | AW880830 | Hs.186273 | ESTs | 2.07 |
| 415192 | D17793 | Hs.78183 | aldo-keto reductase family 1, member C3 | 2.04 |
| 402994 | | | NM_002463*: Homo sapiens myxovirus (influ | 2.04 |
| 426053 | U68105 | Hs.172182 | poly(A)-binding protein, cytoplasmic 1 | 2.02 |
| 423271 | W47225 | Hs.126256 | interleukin 1, beta | 2.01 |
| 419741 | NM_007019 | Hs.93002 | ubiquitin carrier protein E2-C | 1.99 |
| 407581 | R48402 | Hs.173508 | P3ECSL | 1.95 |
| 410197 | NM_005518 | Hs.59889 | 3-hydroxy-3-methylglutaryl-Coenzyme A sy | 1.95 |
| 427122 | AW057736 | Hs.323910 | HER2 receptor tyrosine kinase (c-erb-b2, | 1.93 |
| 436481 | AA379597 | Hs.5199 | HSPC150 protein similar to ubiquitin-con | 1.93 |
| 436251 | BE515065 | Hs.296585 | nucleolar protein (KKE/D repeat) | 1.89 |
| 401961 | | | NM_021626: Homo sapiens serine carboxypep | 1.86 |
| 434042 | AI589941 | Hs.8254 | Home sapiens, Similar to tumor different | 1.85 |
| 447532 | AK000614 | Hs.18791 | hypothetical protein FLJ20607 | 1.84 |
| 418526 | BE019020 | Hs.85838 | solute carrier family 16 (monocarboxylic | 1.83 |
| 429612 | AF062649 | Hs.252587 | pituitary tumor-transforming 1 | 1.80 |
| 422164 | NM_014312 | Hs.112377 | cortic al thymocyte receptor (X. laevis | 1.80 |
| 422247 | U18244 | Hs.113602 | solute carrier family 1 (high affinity a | 1.79 |
| 410407 | X66839 | Hs.63287 | carbonic anhydrase IX | 1.78 |
| 412115 | AK001763 | Hs.73239 | hypothetical protein FLJ10901 | 1.77 |
| 414809 | AI434699 | Hs.77356 | transferrin receptor (p90, CD71) | 1.75 |
| 432210 | AI567421 | Hs.273330 | Homo sapiens, clone IMAGE: 3544662, mRNA, | 1.74 |
| 427239 | BE270447 | Hs.174070 | ubiquitin carrier protein | 1.74 |
| 459198 | AI086347 | Hs.151138 | ESTs | 1.74 |
| 421066 | AU076725 | Hs.101408 | branched chain aminotransferase 2, mitoc | 1.71 |
| 424687 | J05070 | Hs.151738 | matrix metalloproteinase 9 (gelatinase B | 1.70 |
| 450663 | H43540 | Hs.25292 | ribonuclease HI, large subunit | 1.70 |
| 417324 | AW265494 | | ESTs | 1.67 |
| 453883 | AI638516 | Hs.347524 | cofactor required for Sp1 transcriptiona | 1.66 |
| 428000 | R35145 | Hs.291904 | accessory proteins BAP31/BAP29 | 1.65 |
| 450635 | AW403954 | Hs.25237 | mesenchymal stem cell protein DSCD75 | 1.63 |
| 423397 | NM_001838 | Hs.1652 | chemokine (C-C motif) receptor 7 | 1.62 |
| 415440 | D83782 | Hs.78442 | SREBP CLEAVAGE-ACTIVATING PROTEIN | 1.62 |
| 428028 | U52112 | Hs.182018 | interleukin-1 receptor-associated kinase | 1.62 |
| 426783 | Z19084 | Hs.172210 | MUF1 protein | 1.62 |
| 445937 | AI452943 | Hs.321231 | UDP-Gal: betaGlcNAc beta 1,4-galactosylt | 1.61 |
| 445462 | AA378776 | Hs.288649 | hypothetical protein MGC3077 | 1.60 |
| 400965 | | | C11002190*: gi\|12737279\|ref\|XP_012163.1\| | 1.59 |
| 432269 | NM_002447 | Hs.2942 | macrophage stimulating 1 receptor (c-met | 1.59 |
| 429578 | AI969028 | Hs.99389 | ESTs | 1.59 |
| 449027 | AJ271216 | Hs.22880 | dipeptidylpeptidase III | 1.59 |
| 431840 | AA534908 | Hs.2860 | POU domain, class 5, transcription facto | 1.59 |
| 417900 | BE250127 | Hs.82906 | CDC20 (cell division cycle 20, S. cerevi | 1.59 |
| 429002 | AW248439 | Hs.2340 | junction plakoglobin | 1.57 |
| 442410 | AW996503 | Hs.197680 | ESTs | 1.56 |
| 407601 | AC002300 | Hs.37129 | sodium channel, nonvoltage-gated 1, beta | 1.55 |
| 418543 | NM_005329 | Hs.85962 | hyaluronan synthase 3 | 1.54 |
| 424611 | NM_001421 | Hs.151139 | E74-like factor 4 (ets domain transcript | 1.54 |
| 414732 | AW410976 | Hs.77152 | minichromosome maintenance deficient (S. | 1.54 |
| 408930 | AA146721 | Hs.334686 | hypothetical protein FLJ21588 | 1.53 |
| 448993 | AI471630 | Hs.8127 | KIAA0144 gene product | 1.52 |
| 414053 | BE391635 | Hs.75725 | transgelin 2 | 1.51 |
| 433662 | W07162 | Hs.150826 | CATX-8 protein | 1.50 |
| 432562 | BE531048 | Hs.278422 | DKFZP586G1122 protein | 1.50 |
| 402260 | | | NM_001436*: Homo sapiens fibrillarin (FBL | 1.48 |
| 426127 | L36983 | Hs.167013 | dynamin 2 | 1.48 |
| 427557 | NM_002659 | Hs.179657 | plasminogen activator, urokinase recepto | 1.48 |
| 418026 | BE379727 | Hs.83213 | fatty acid binding protein 4, adipocyte | 1.47 |
| 418960 | NM_004494 | Hs.89525 | hepatoma-derived growth factor (high-mob | 1.46 |
| 428293 | BE250944 | Hs.183556 | solute carrier family 1 (neutral amino a | 1.46 |
| 432344 | AI476474 | Hs.248156 | ESTs | 1.46 |
| 453449 | W16752 | Hs.32981 | sema domain, immunoglobulin domain (lg), | 1.46 |
| 450690 | AA296696 | Hs.333418 | FXYD domain-containing ion transport reg | 1.46 |
| 441940 | AW298115 | Hs.128152 | ESTs | 1.45 |
| 409893 | AW247090 | Hs.57101 | minichromosome maintenance deficient (S. | 1.44 |
| 439318 | AW837046 | Hs.6527 | G protein-coupled receptor 56 | 1.42 |
| 422565 | BE259035 | Hs.118400 | singed (Drosophila)-like (sea urchin fas | 1.41 |
| 428928 | BE409838 | Hs.194657 | cadherin 1, type 1, E-cadherin (epitheli | 1.41 |
| 445417 | AK001058 | Hs.12680 | Homo sapiens cDNA FLJ10196 fis, clone HE | 1.39 |
| 441565 | AW953575 | Hs.303125 | p53-induced protein PIGPC1 | 1.37 |
| 439180 | AI393742 | Hs.199067 | v-erb-b2 avian erythroblastic leukemia v | 1.35 |
| 418399 | AF131781 | Hs.84753 | hypothetical protein FLJ12442 | 1.32 |
| 432636 | AA340864 | Hs.278562 | claudin 7 | 1.32 |
| 439053 | BE244588 | Hs.6456 | chaperonin containing TCP1, subunit 2 (b | 1.32 |
| 413762 | AW411479 | Hs.848 | FK506-binding protein 4 (59 kD) | 1.31 |
| 453914 | NM_000507 | Hs.574 | fructose-1,6-bisphosphatase 1 | 1.28 |
| 430056 | X97548 | Hs.228059 | KRAB-asoociated protein 1 | 1.24 |
| 451524 | AK001466 | Hs.26516 | hypothetical protein FLJ10604 | 1.23 |
| 431441 | U81961 | Hs.2794 | sodium channel, nonvoltage-gated 1 alpha | 1.20 |
| 439863 | BE547830 | Hs.9408 | paired immunoglobulin-like receptor beta | 1.19 |
| 451541 | BE279383 | Hs.26557 | plakophilin 3 | 1.16 |
| 406906 | Z25424 | | gb: H. sapiens protein-serine/threonine ki | 1.11 |
| 429504 | X99133 | Hs.204238 | lipocalin 2 (oncogene 24p3) | 1.00 |
| 414002 | NM_006732 | Hs.75678 | FBJ murine osteosarcoma viral oncogene h | 0.86 |
| 431369 | BE184455 | Hs.251754 | secretory leukocyte protease inhibitor ( | 0.61 |

Pkey: Unique Eos probeset identifier number
ExAccn: Exemplar Accession number, Genbank accession number
UnigeneID: Unigene number
Unigene Title: Unigene gene title
R1 90th percentile of bladder tumor Als divided by the 90th percentile of normal body sample Als

[0374] TABLE 5B

| Pkey | CAT Number | Accession |
|---|---|---|
| 414221 | 142696_1 | AW450979 AA136653 AA136656 AW419381 |
| | | AA984358 AA492073 BE168945 AA809054 |
| | | AW238038 BE011212 BE011359 BE011367 |
| | | BE011368 BE011362 BE011215 |
| | | BE011365 BE011363 |
| 417324 | 166714_1 | AW265494 AA455904 AA195677 AW265432 |
| | | AW991605 AA456370 |
| 436608 | 42361_3 | AA628980 AI126603 BE504035 |
| 451385 | 86787_1 | AA017656 AA017374 AA019761 |
| 454609 | 1226517_1 | AW810204 AW810555 AW810196 |
| | | AW810619 AW810507 |
| 455797 | 1366826_1 | BE091833 BE091874 BE091871 |

Pkey: Unique Eos probeset identifier number
CAT number: Gene cluster number
Accession: Genbank accession numbers

[0375] TABLE 5C

| Pkey | Ref | Strand | Nt_position |
|---|---|---|---|
| 400965 | 7770576 | Minus | 173043-173564 |
| 401066 | 8217436 | Plus | 71448-71574 |
| 401335 | 9884881 | Plus | 15736-16352 |
| 401961 | 4581193 | Minus | 124054-124209 |
| 402239 | 7690131 | Plus | 38175-38304, 42133-42266 |
| 402260 | 3399665 | Minus | 113765-113910, 115653-115765, |
| | | | 116808-116940 |
| 402305 | 7328724 | Plus | 40832-41362 |
| 402948 | 9368458 | Minus | 143456-143626, 143808-143935 |
| 402994 | 2996643 | Minus | 4727-4969 |
| 403383 | 9438267 | Minus | 119837-121197 |
| 403477 | 9958251 | Plus | 111834-112008 |
| 404394 | 3135305 | Minus | 37121-37205, 37491-37762, |
| | | | 41053-41140, 41322-41593, |
| | | | 41773-41919 |
| 404917 | 7341851 | Plus | 49330-49498 |
| 405531 | 9665194 | Plus | 35602-35803 |
| 406387 | 9256180 | Plus | 116229-116371, 117512-117651 |
| 406542 | 7711499 | Plus | 117335-118473 |

Pkey: Unique number corresponding to an Eos probeset
Ref: Sequence source. The 7 digit numbers in this column are Genbank Identifier (GI) numbers. “Dunham I. et al.” refers to the publication entitled “The DNA sequence of human chromosome 22.” Dunham I. et al., Nature (1999) 402: 489-495.
Strand: Indicates DNA strand from which exons were predicted.
Nt_position: Indicates nucleotide positions of predicted exons.

[0376] TABLE 6A
Genes upregulated in bladder cancer

| Pkey | ExAccn | UnigeneID | Unigene Title | R1 | R2 |
|---|---|---|---|---|---|
| 439926 | AW014875 | Hs.137007 | ESTs | 11.31 | 11.31 |
| 413324 | V00571 | Hs.75294 | corticotropin releasing hormone | 9.15 | 9.15 |
| 421110 | AJ250717 | Hs.1355 | cathepsin E | 9.07 | 9.07 |
| 417308 | H60720 | Hs.81892 | KIAA0101 gene product | 8.50 | 8.50 |
| 418406 | X73501 | Hs.84905 | cytokeratin 20 | 8.10 | 8.10 |
| 446619 | AU076643 | Hs.313 | secreted phosphoprotein 1 (osteopontin, | 7.98 | 7.98 |
| 433001 | AF217513 | Hs.279905 | clone HQ0310 PRO0310p1 | 7.67 | 7.67 |
| 408243 | Y00787 | Hs.624 | interleukin 8 | 7.56 | 7.56 |
| 416065 | BE267931 | Hs.78996 | proliferating cell nuclear antigen | 7.17 | 5.17 |
| 425397 | J04088 | Hs.156346 | topoisomerase (DNA) II alpha (170 kD) | 7.17 | 8.24 |
| 414183 | AW957446 | Hs.301711 | ESTs | 7.14 | 4.62 |
| 418007 | M13509 | Hs.83169 | matrix metalloproteinase 1 (interstitial | 7.12 | 7.12 |
| 426125 | X87241 | Hs.166994 | FAT tumor suppressor (Drosophila) homolo | 6.90 | 3.38 |
| 427337 | Z46223 | Hs.176663 | Fc fragment of IgG, low affinity IIIb, r | 6.85 | 4.98 |
| 441633 | AW958544 | Hs.112242 | normal mucosa of esophagus specific 1 | 6.42 | 6.42 |
| 438091 | AW373062 | | nuclear receptor subfamily 1, group l, m | 6.32 | 6.32 |
| 413063 | AL035737 | Hs.75184 | chitinase 3-like 1 (cartilage glycoprote | 6.09 | 3.67 |
| 414219 | W20010 | Hs.75823 | ALL1-fused gene from chromosome 1q | 5.93 | 4.68 |
| 405033 | | | C1002652*: gi\|544327\|sp\|Q04799\|FMO5_RABIT | 5.84 | 5.84 |
| 413132 | NM_006823 | Hs.75209 | protein kinase (cAMP-dependent, catalyti | 5.79 | 5.68 |
| 428336 | AA503115 | Hs.183752 | microseminoprotein, beta- | 5.78 | 4.57 |
| 449230 | BE613348 | Hs.211579 | melanoma cell adhesion molecule | 5.69 | 5.82 |
| 423673 | BE003054 | Hs.1695 | matrix metalloproteinase 12 (macrophage | 5.69 | 7.30 |
| 415511 | AI732617 | Hs.182362 | ESTs | 5.65 | 5.65 |
| 426028 | NM_001110 | Hs.172028 | a disintegrin and metalloproteinase doma | 5.60 | 5.60 |
| 421948 | L42583 | Hs.334309 | keratin 6A | 5.59 | 14.20 |
| 428651 | AF196478 | Hs.188401 | annexin A10 | 5.55 | 5.55 |
| 424008 | R02740 | Hs.137555 | putative chemokine receptor; GTP-binding | 5.38 | 5.59 |
| 406687 | M31126 | | matrix metalloproteinase 11 (stromelysin | 5.36 | 5.34 |
| 439453 | BE264974 | Hs.6566 | thyroid hormone receptor interactor 13 | 5.35 | 5.35 |
| 408246 | N55669 | Hs.333823 | mitochondrial ribosomal protein L13 | 5.20 | 3.50 |
| 427678 | BE267756 | Hs.180312 | mitochondrial ribosomal protein S16 | 5.13 | 4.10 |
| 426158 | NM_001982 | Hs.199067 | v-erb-b2 avian erythroblastic leukemia v | 4.97 | 3.71 |
| 442315 | AA173992 | Hs.7956 | ESTs, Moderately similar to ZN91_HUMAN Z | 4.90 | 4.90 |
| 418322 | AA284166 | Hs.84113 | cyclin-dependent kinase inhibitor 3 (CDK | 4.90 | 4.77 |
| 417720 | AA205625 | Hs.208067 | ESTs | 4.84 | 7.34 |
| 423979 | AF229181 | Hs.136644 | CS box-containing WD protein | 4.81 | 4.81 |
| 420981 | L40904 | Hs.100724 | peroxisome proliferative activated recep | 4.81 | 4.43 |
| 433470 | AW960564 | | transmembrane 4 superfamily member 1 | 4.72 | 4.72 |
| 429138 | AB020657 | Hs.197298 | NS1-binding protein | 4.71 | 4.71 |
| 408063 | BE086548 | Hs.42346 | calcineurin-binding protein calsarcin-1 | 4.71 | 4.71 |
| 452714 | AW770994 | Hs.30340 | hypothetical protein KIAA1165 | 4.69 | 4.69 |
| 442432 | BE093589 | Hs.38178 | hypothetical protein FLJ23468 | 4.68 | 4.68 |
| 424834 | AK001432 | Hs.153408 | Homo sapiens cDNA FLJ10570 fis, clone NT | 4.65 | 4.65 |
| 446921 | AB012113 | Hs.16530 | small inducible cytokine subfamily A (Cy | 4.64 | 4.64 |
| 427490 | Z95152 | Hs.178695 | mitogen-activated protein kinase 13 | 4.63 | 5.12 |
| 412490 | AW803564 | Hs.288850 | Homo sapiens cDNA: FLJ22528 fis, clone H | 4.61 | 4.61 |
| 418030 | BE207573 | Hs.83321 | neuromedin B | 4.60 | 4.60 |
| 401192 | | | Target Exon | 4.60 | 4.29 |
| 426761 | AI015709 | Hs.172089 | Homo sapiens mRNA; cDNA DKFZp586I2022 (f | 4.59 | 3.51 |
| 452747 | BE153855 | Hs.61460 | Ig superfamily receptor LNIR | 4.58 | 5.33 |
| 449618 | AI076459 | Hs.15978 | KIAA1272 protein | 4.58 | 4.58 |
| 423725 | AJ403108 | Hs.132127 | hypothetical protein LOC57822 | 4.55 | 4.55 |
| 415701 | NM_003878 | Hs.78619 | gamma-glutamyl hydrolase (conjugase, fol | 4.52 | 4.70 |
| 446742 | AA232119 | Hs.16085 | putative G-protein coupled receptor | 4.49 | 4.11 |
| 419433 | AA814807 | Hs.7395 | hypothetical protein FLJ23182 | 4.48 | 4.48 |
| 412326 | R07566 | Hs.73817 | small inducible cytokine A3 (homologous | 4.47 | 4.47 |
| 427528 | AU077143 | Hs.179565 | minichromosome maintenance deficient (S. | 4.45 | 4.45 |
| 444371 | BE540274 | Hs.239 | forkhead box M1 | 4.44 | 3.87 |
| 444006 | BE395085 | Hs.10086 | type I transmembrane protein Fn14 | 4.43 | 3.63 |
| 424308 | AW975531 | Hs.154443 | minichromosome maintenance deficient (S. | 4.43 | 4.43 |
| 401093 | | | C12000586*: gi\|6330167\|dbj\|BAA86477.1\| (A | 4.40 | 4.40 |
| 447644 | AW861622 | Hs.108646 | Homo sapiens cDNA FLJ14934 fis, clone PL | 4.39 | 4.39 |
| 417933 | X02308 | Hs.82962 | thymidylate synthetase | 4.38 | 4.35 |
| 409461 | AA382169 | Hs.54483 | N-myc (and STAT) interactor | 4.36 | 3.68 |
| 401451 | | | NM_004496*: Homo sapiens hepatocyte nucle | 4.35 | 4.35 |
| 450746 | D82673 | Hs.278589 | general transcription factor II, i | 4.35 | 3.36 |
| 414683 | S78296 | Hs.76888 | hypothetical protein MGC12702 | 4.34 | 4.74 |
| 434203 | BE262677 | Hs.283558 | hypothetical protein PRO1855 | 4.31 | 4.31 |
| 417615 | BE548641 | Hs.82314 | hypoxanthine phosphoribosyltransferase 1 | 4.30 | 4.30 |
| 416815 | U41514 | Hs.80120 | UDP-N-acetyl-alpha-D-galactosamine: polyp | 4.30 | 4.30 |
| 440086 | NM_005402 | Hs.288757 | v-ral simian leukemia viral oncogene hom | 4.29 | 4.29 |
| 417715 | AW969587 | Hs.86366 | ESTs | 4.27 | 7.45 |
| 409757 | NM_001898 | Hs.123114 | cystatin SN | 4.24 | 3.39 |
| 412140 | AA219691 | Hs.73625 | RAB6 interacting, kinesin-like (rabkines | 4.24 | 4.24 |
| 432842 | AW674093 | Hs.334822 | hypothetical protein MGC4485 | 4.21 | 4.12 |
| 446847 | T51454 | Hs.82845 | Homo sapiens cDNA: FLJ21930 fis, clone H | 4.20 | 4.20 |
| 436856 | AI469355 | Hs.127310 | ESTs | 4.19 | 4.19 |
| 428450 | NM_014791 | Hs.184339 | KIAA0175 gene product | 4.16 | 4.90 |
| 425234 | AW152225 | Hs.165909 | ESTs, Weakly similar to I38022 hypotheti | 4.14 | 4.14 |
| 409231 | AA446644 | Hs.692 | GA733-2 antigen; epithelial glycoprotein | 4.14 | 5.99 |
| 426283 | NM_003937 | Hs.169139 | kynureninase (L-kynurenine hydrolase) | 4.12 | 4.12 |
| 446849 | AU076617 | Hs.16251 | cleavage and polyadenylation specific fa | 4.12 | 3.43 |
| 400843 | | | NM_003105*: Homo sapiens sortilin-related | 4.11 | 5.51 |
| 449722 | BE280074 | Hs.23960 | cyclin B1 | 4.09 | 4.09 |
| 405506 | | | Target Exon | 4.09 | 3.75 |
| 420344 | BE463721 | Hs.97101 | putative G protein-coupled receptor | 4.07 | 4.07 |
| 426997 | BE620738 | Hs.173125 | peptidylprolyl isomerase F (cyclophilin | 4.05 | 4.80 |
| 456525 | AW468397 | Hs.100000 | S100 calcium-binding protein A8 (calgran | 4.03 | 7.64 |
| 437150 | R51407 | Hs.77910 | 3-hydroxy-3-methylglutaryl-Coenzyme A sy | 4.02 | 4.02 |
| 413794 | AF234532 | Hs.61638 | myosin X | 4.02 | 4.02 |
| 422511 | AU076442 | Hs.117938 | collagen, type XVII, alpha 1 | 4.02 | 4.72 |
| 414020 | NM_002984 | Hs.75703 | small inducible cytokine A4 (homologous | 4.01 | 3.99 |
| 416391 | AI878927 | Hs.79284 | mesoderm specific transcript (mouse) hom | 4.01 | 4.01 |
| 422809 | AK001379 | Hs.121028 | hypothetical protein FLJ10549 | 4.00 | 4.00 |
| 400277 | | | Eos Control | 4.00 | 3.47 |
| 415791 | H09366 | Hs.78853 | uracil-DNA glycosylase | 3.99 | 3.37 |
| 412610 | X90908 | Hs.74126 | fatty acid binding protein 6, ileal (gas | 3.98 | 4.77 |
| 427557 | NM_002659 | Hs.179657 | plasminogen activator, urokinase recepto | 3.98 | 3.95 |
| 413753 | U17760 | Hs.75517 | laminin, beta 3 (nicein (125 kD), kalinin | 3.96 | 6.95 |
| 420859 | AW468397 | Hs.100000 | S100 calcium-binding protein A8 (calgran | 3.92 | 5.04 |
| 400409 | AF153341 | | Homo sapiens winged helix/forkhead trans | 3.91 | 3.88 |
| 408988 | AL119844 | Hs.49476 | Homo sapiens clone TUA8 Cri-du-chat regi | 3.90 | 3.90 |
| 411678 | AI907114 | Hs.71465 | squalene epoxidase | 3.89 | 3.89 |
| 429113 | D28235 | Hs.196384 | prostaglandin-endoperoxide synthase 2 (p | 3.87 | 3.87 |
| 428428 | AL037544 | Hs.184298 | cyclin-dependent kinase 7 (homolog of Xe | 3.87 | 3.87 |
| 442932 | AA457211 | Hs.8858 | bromodomain adjacent to zinc finger doma | 3.85 | 4.50 |
| 429083 | Y09397 | Hs.227817 | BCL2-related protein A1 | 3.85 | 3.85 |
| 439963 | AW247529 | Hs.6793 | platelet-activating factor acetylhydrola | 3.82 | 3.77 |
| 441362 | BE614410 | Hs.23044 | RAD51 (S. cerevisiae) homolog (E coli Re | 3.82 | 3.82 |
| 430589 | AJ002744 | Hs.246315 | UDP-N-acetyl-alpha-D-galactosamine: polyp | 3.81 | 3.81 |
| 417771 | AA804698 | Hs.82547 | retinoic acid receptor responder (tazaro | 3.81 | 3.62 |
| 430259 | BE550182 | Hs.127826 | RalGEF-like protein 3, mouse homolog | 3.80 | 3.80 |
| 447973 | AB011169 | Hs.20141 | similar to S. cerevisiae SSM4 | 3.77 | 3.77 |
| 404875 | | | NM_022819*: Homo sapiens phospholipase A2 | 3.77 | 3.46 |
| 411299 | BE409857 | Hs.69499 | hypothetical protein | 3.76 | 3.76 |
| 418827 | BE327311 | Hs.47166 | HT021 | 3.76 | 3.76 |
| 446839 | BE091926 | Hs.16244 | mitotic spindle coiled-coil related prot | 3.75 | 3.75 |
| 407137 | T97307 | | gb: ye53h05.s1 Soares fetal liver spleen | 3.73 | 3.73 |
| 433376 | AI249361 | Hs.74122 | caspase 4, apoptosis-related cysteine pr | 3.71 | 3.71 |
| 400294 | N95796 | Hs.278695 | Homo sapiens prostein mRNA, complete cds | 3.70 | 3.45 |
| 409518 | BE384836 | Hs.3454 | KIAA1821 protein | 3.69 | 3.69 |
| 430024 | AI808780 | Hs.227730 | integrin, alpha 6 | 3.69 | 3.69 |
| 426088 | AF038007 | Hs.166196 | ATPase, Class I, type 8B, member 1 | 3.68 | 3.68 |
| 418478 | U38945 | Hs.1174 | cyclin-dependent kinase inhibitor 2A (me | 3.68 | 3.66 |
| 414761 | AU077228 | Hs.77256 | enhancer of zeste (Drosophila) homolog 2 | 3.67 | 3.67 |
| 413670 | AB000115 | Hs.75470 | hypothetical protein, expressed in osteo | 3.67 | 3.41 |
| 424840 | D79987 | Hs.153479 | extra spindle poles, S. cerevisiae, homo | 3.67 | 3.88 |
| 434263 | N34895 | Hs.44648 | ESTs | 3.65 | 3.65 |
| 438280 | AW015534 | Hs.217493 | annexin A2 | 3.63 | 3.36 |
| 443426 | AF098158 | Hs.9329 | chromosome 20 open reading frame 1 | 3.63 | 3.68 |
| 408989 | AW361666 | Hs.49500 | KIAA0746 protein | 3.61 | 3.66 |
| 416640 | BE262478 | Hs.79404 | neuron-specific protein | 3.60 | 4.22 |
| 416926 | H03109 | Hs.108920 | HT018 protein | 3.59 | 3.59 |
| 414368 | W70171 | Hs.75939 | uridine monophosphate kinase | 3.59 | 3.53 |
| 402727 | | | NM_025065: Homo sapiens hypothetical prot | 3.58 | 3.58 |
| 419381 | AB023420 | Hs.90093 | heat shock 70 kD protein 4 | 3.56 | 3.77 |
| 416114 | AI695549 | Hs.183868 | glucuronidase, beta | 3.55 | 3.55 |
| 424941 | AA128376 | Hs.153884 | ATP binding protein associated with cell | 3.55 | 3.55 |
| 431958 | X63629 | Hs.2877 | cadherin 3, type 1, P-cadherin (placenta | 3.54 | 4.63 |
| 429238 | NM_002849 | Hs.198288 | protein tyrosine phosphatase, receptor t | 3.53 | 3.92 |
| 420159 | AI572490 | Hs.99785 | Homo sapiens cDNA: FLJ21245 fis, clone C | 3.51 | 5.77 |
| 400289 | X07820 | Hs.2258 | matrix metalloproteinase 10 (stromelysin | 3.50 | 3.50 |
| 418203 | X54942 | Hs.83758 | CDC28 protein kinase 2 | 3.50 | 3.50 |
| 415220 | AA431880 | Hs.181174 | ESTs, Weakly similar to T19201 hypotheti | 3.50 | 3.50 |
| 428371 | AB012193 | Hs.183874 | cullin 4A | 3.46 | 3.46 |
| 418663 | AK001100 | Hs.41690 | desmocollin 3 | 3.45 | 4.74 |
| 404977 | | | Insulin-like growth factor 2 (somatomedi | 3.45 | 3.89 |
| 422663 | AW500087 | Hs.119014 | zinc finger protein 175 | 3.44 | 3.44 |
| 434061 | AW024973 | Hs.283675 | NPD009 protein | 3.41 | 5.64 |
| 418113 | AI272141 | Hs.83484 | SRY (sex determining region Y)-box 4 | 3.41 | 4.32 |
| 431689 | AA305688 | Hs.267695 | UDP-Gal: betaGlcNAc beta 1,3-galactosyltr | 3.40 | 3.40 |
| 411943 | BE502436 | Hs.7962 | ESTs, Weakly similar to S44608 C02F5.6 p | 3.39 | 4.27 |
| 420005 | AW271106 | Hs.133294 | ESTs | 3.38 | 3.40 |
| 453450 | AW797627 | Hs.347459 | ADP-ribosylation factor 6 | 3.38 | 3.87 |
| 410315 | AI638871 | Hs.17625 | Homo sapiens cDNA: FLJ22524 fis, clone H | 3.36 | 3.36 |
| 428839 | AI767756 | Hs.82302 | Homo sapiens cDNA FLJ14814 fis, clone NT | 3.35 | 3.35 |
| 437469 | AW753112 | Hs.15514 | hypothetical protein MGC3260 | 3.35 | 3.35 |
| 407151 | H25836 | Hs.301527 | ESTs, Moderately similar to unknown [H. s | 3.34 | 3.34 |
| 428157 | AI738719 | Hs.198427 | hexokinase 2 | 3.33 | 3.73 |
| 450293 | N36754 | Hs.171118 | hypothetical protein FLJ00026 | 3.33 | 3.33 |
| 400750 | | | Target Exon | 3.33 | 3.33 |
| 450139 | AK001838 | Hs.296323 | serum/glucocorticoid regulated kinase | 3.33 | 3.33 |
| 412636 | NM_004415 | | desmoplakin (DPI, DPII) | 3.30 | 4.81 |
| 447578 | AA912347 | Hs.136585 | ESTs, Weakly similar to JC5314 CDC28/cdc | 3.27 | 3.38 |
| 430315 | NM_004293 | Hs.239147 | guanine deaminase | 3.26 | 4.30 |
| 421594 | R45689 | Hs.21889 | Homo sapiens cDNA FLJ12978 fis, clone NT | 3.26 | 3.41 |
| 443030 | R68048 | Hs.9238 | hypothetical protein FLJ23516 | 3.19 | 3.34 |
| 436911 | AA142984 | Hs.5344 | adaptor-related protein complex 1, gamma | 3.17 | 3.40 |
| 440006 | AK000517 | Hs.6844 | hypothetical protein FLJ20510 | 3.06 | 3.52 |
| 443171 | BE281128 | Hs.9030 | TONDU | 3.05 | 3.83 |
| 429343 | AK000785 | Hs.199480 | Homo sapiens, Similar to epsin 3, clone | 3.01 | 3.53 |
| 408380 | AF123050 | Hs.44532 | diubiquitin | 2.99 | 4.11 |
| 421508 | NM_004833 | Hs.105115 | absent in melanoma 2 | 2.99 | 3.67 |
| 439750 | AL359053 | Hs.57664 | Homo sapiens mRNA full length insert cDN | 2.97 | 4.55 |
| 452046 | AB018345 | Hs.27657 | KIAA0802 protein | 2.95 | 3.39 |
| 451940 | AI735759 | Hs.52620 | integrin, beta 8 | 2.93 | 3.58 |
| 407722 | BE252241 | Hs.38041 | pyridoxal (pyridoxine, vitamin B6) kinas | 2.90 | 3.68 |
| 422282 | AF019225 | Hs.114309 | apolipoprotein L | 2.89 | 3.57 |
| 402230 | | | Target Exon | 2.88 | 5.36 |
| 406685 | M18728 | | gb: Human nonspecific crossreacting antig | 2.80 | 5.80 |
| 417880 | BE241595 | Hs.82848 | selectin L (lymphocyte adhesion molecule | 2.79 | 3.89 |
| 447957 | NM_014821 | Hs.20126 | KIAA0317 gene product | 2.75 | 3.45 |
| 418004 | U37519 | Hs.87539 | aldehyde dehydrogenase 3 family, member | 2.75 | 3.46 |
| 417275 | X63578 | Hs.295449 | parvalbumin | 2.73 | 3.54 |
| 431211 | M86849 | Hs.323733 | gap junction protein, beta 2, 26 kD (conn | 2.72 | 8.39 |
| 401781 | | | Target Exon | 2.62 | 4.15 |
| 407242 | M18728 | | gb: Human nonspecific crossreacting antig | 2.54 | 5.96 |
| 428423 | AU076517 | Hs.184276 | solute carrier family 9 (sodium/hydrogen | 2.52 | 4.27 |
| 430200 | BE613337 | Hs.234896 | geminin | 2.52 | 4.19 |
| 451035 | AU076785 | Hs.430 | plastin 1 (I isoform) | 2.51 | 4.15 |
| 443162 | T49951 | Hs.9029 | DKFZP434G032 protein | 2.48 | 3.66 |
| 441495 | AW294603 | Hs.127039 | ESTs | 2.45 | 3.60 |
| 449246 | AW411209 | Hs.23363 | hypothetical protein FLJ10983 | 2.45 | 3.52 |
| 401780 | | | NM_005557*: Homo sapiens keratin 16 (foca | 2.22 | 4.49 |
| 417079 | U65590 | Hs.81134 | interleukin 1 receptor antagonist | 2.20 | 3.55 |
| 422168 | AA586894 | Hs.112408 | S100 calcium-binding protein A7 (psorias | 2.15 | 6.08 |
| 439394 | AA149250 | Hs.56105 | ESTs | 2.05 | 3.95 |
| 427315 | AA179949 | Hs.175563 | Home sapiens mRNA; cDNA DKFZp564N0763 (f | 1.79 | 3.88 |

Pkey: Unique Eos probeset identifier number
ExAccn: Exemplar Accession number, Genbank accession number
UnigeneID: Unigene number
Unigene Title: Unigene gene title
R1 90th percentile of bladder tumor Als divided by the 90th percentile of normal urothelium biopsy Ais
R2 90th percentile of bladder tumor Als divided by the 90th percentile of normal urothelium biopsy and normal bladder Als

[0377] TABLE 6B

| Pkey | CAT Number | Accession |
|---|---|---|
| 412636 | 13165_1 | NM_004415 AL031058 M77830 BE149760 AW752599 AW848723 AW376697 AW376817 |
| | | AW376699 AW848371 AW376782 AW848789 AW361413 AW849074 AW997139 AW799304 |
| | | AW799309 BE077020 BE077017 BE185187 AW997196 BE156621 BE179915 BE006561 |
| | | BE143155 AW890985 BE002107 AW103521 AA857316 AW383133 BE011378 AW170253 |
| | | BE185750 AW886475 BE160433 J05211 BE082576 BE082584 BE004047 AW607238 |
| | | AW377700 AW377699 BE082526 BE082505 BE082507 BE082514 AW178000 AW177933 |
| | | AI905935 AW747877 AW748114 BE148516 AW265328 AW847678 AW847688 AW365151 |
| | | AW365148 AW365153 AW365156 AW365175 AW365157 AW365154 AW068840 BE005272 |
| | | AW365145 BE001925 BE182166 BE144243 BE001923 AI951766 AI434518 BE184920 |
| | | BE184933 AI284090 BE184941 AW804674 BE184924 C04715 W39488 AW995615 |
| | | BE184948 BE159646 AW606653 AA099891 AA131128 AA337270 AA340777 AW384371 |
| | | AA852212 R58704 AW366566 AW364859 AA025851 AA025852 AA455100 AA719958 |
| | | AW352220 AW996245 BE165351 BE073467 AA377127 AW890264 AW609750 AW391912 |
| | | AW849690 T87267 AW853812 AA852213 W74149 BE009090 AA056401 H91011 |
| | | AW368529 AW390272 C18467 AW674920 N57176 AA026480 AW576767 H93284 |
| | | AA026863 AW177787 AA026654 AW177786 BE092134 BE092137 BE092136 AW177784 |
| | | AI022862 BE091653 AW376811 AW848592 AA040018 BE185331 BE182164 AA368564 |
| | | AW951576 T29918 AA131077 W95048 W25458 AW205789 H90899 N29754 |
| | | W32490 R20904 BE167181 BE167165 N84767 H27408 H30146 AI190590 |
| | | C03378 AI554403 AI205263 AA128470 AI392926 AF139065 AW370813 AW370827 |
| | | AW798417 AW798780 AW798883 AW798569 R33557 AA149190 C03029 AW177783 |
| | | AA088866 AW370829 AA247685 BE002273 AI760816 AI439101 AW879451 AI700963 |
| | | AA451923 AI340326 AI590975 T48793 AI568096 AI142882 AA039975 AI470146 |
| | | AA946936 BE067737 BE067786 W19287 AA644381 AA702424 AI417612 AI306554 |
| | | AI686869 AI568892 AW190555 AI571075 AI220573 AA056527 AI471874 AI304772 |
| | | AW517828 AI915596 AI627383 AI270345 AW021347 AW166807 AW105614 AI346078 |
| | | AA552300 W95070 AI494069 AI911702 AA149191 AA026864 AI830049 AI887258 |
| | | AW780435 AI910434 AI819984 AI858282 AI078449 AI025932 AI860584 AI635878 |
| | | AA026047 AA703232 D12062 AW192085 AA658154 AW514597 AW591892 T87181 |
| | | AA782066 AW243815 AW150038 AW268383 AW004633 AI927207 AA782109 AW473233 |
| | | AI804485 AW169216 AI572669 AA602182 AW015480 AW771865 AI270027 AA961816 |
| | | AA283207 AI076962 AI498487 AI348053 AI783914 H44405 AW799118 AA128330 |
| | | AA515500 AA918281 W02156 AI905927 AA022701 W38382 R20795 T77861 |
| | | AW860878 |
| 433470 | 3672_1 | AW960564 AA092457 T55890 D56120 T92525 AI815987 BE182608 BE182595 |
| | | AW080238 M90657 AA347236 AW961686 AW176446 AA304671 AW583735 T61714 |
| | | AA316968 AI446615 AA343532 AA083489 AA488005 W52095 W39480 N57402 |
| | | D82638 W25540 W52847 D82729 D58990 BE619182 AA315188 AA308636 |
| | | AA112474 W76162 AA088544 H52265 AA301631 H80982 AA113786 BE620997 |
| | | AW651691 AA343799 BE613669 BE547180 BE546656 F11933 AA376800 AW239185 |
| | | AA376086 BE544387 BE619041 AA452515 AA001806 AA190873 AA180483 AA159546 |
| | | F00242 AI940609 AI940602 AI189753 T97663 T66110 AW062896 AW062910 |
| | | AW062902 AI051622 AI828930 AA102452 AI685095 AI819390 AA557597 AA383220 |
| | | AI804422 AI633575 AW338147 AW603423 AW606800 AW750567 AW510672 AI250777 |
| | | AA083510 AW629109 AW513200 AA921353 AI677934 AI148698 AI955858 AA173825 |
| | | AA453027 AI027865 AW375542 AA454099 AA733014 AI591384 R79300 R80023 |
| | | AA843108 AA626058 AA844898 AW375550 AA889018 AI474275 AW205937 AI052270 |
| | | AW388117 AW388111 AA699452 AI242230 N47476 H38178 AA366621 AA113196 |
| | | AA130023 H39740 T61629 AI885973 AW083671 AA179730 AA305757 AI285455 |
| | | N83956 AA216013 AA336155 AW999959 T97525 AA345349 T91762 AA771981 |
| | | AI285092 AI591386 BE392486 BE385852 AA682601 AI682884 AA345840 T85477 |
| | | AA292949 AA932079 AA098791 D82607 T48574 AW752038 C06300 |
| 438091 | 44964_1 | AW373062 T55662 AI299190 BE174210 AW579001 H01811 W40186 R67100 |
| | | AI923886 AW952164 AA628440 AW898607 AW898616 AA709126 AW898628 AW898544 |
| | | AA947932 AW898625 AW898622 AI276125 AI185720 AW510698 AA987230 T52522 |
| | | BE467708 AW243400 AW043642 AI288245 AI186932 D52654 D55017 D52715 |
| | | D52477 D53933 D54679 AI298739 AI146984 AI922204 N98343 BE174213 |
| | | AA845571 AI813854 AI214518 AI635262 AI139455 AI707807 AI698085 AW884528 |
| | | AI024768 AI004723 AW087420 AI565133 N94964 AI268939 AW513280 AI061126 |
| | | AI435818 AI859106 AI360506 AI024767 AA513019 AA757598 X56196 AA902959 |
| | | AI334784 AI860794 AA010207 AW890091 AW513771 AI951391 AI337671 T52499 |
| | | AA890205 AI640908 H75966 AA463487 AA358688 AI961767 AI866295 AA780994 |
| | | AI985913 BE174196 AA029094 AW592159 T55581 N79072 AI611201 AA910812 |
| | | AI220713 AW149306 AI758412 AA045713 R79750 N76096 |

Pkey: Unique Eos probeset identifier number
CAT number: Gene cluster number
Accession: Genbank accession numbers

[0378] TABLE 6C

| Pkey | Ref | Strand | Nt_position |
|---|---|---|---|
| 400750 | 8119067 | Plus | 198991-199168, 199316-199548 |
| 400843 | 9188605 | Plus | 5863-5970, 7653-7784, 8892-9023, |
| | | | 9673-9807, 10634-10789, |
| | | | 15254-15403, 23827-23958 |
| 401093 | 8516137 | Minus | 22335-23166 |
| 401192 | 9719502 | Minus | 69559-70101 |
| 401451 | 6634068 | Minus | 119926-121272 |
| 401780 | 7249190 | Minus | 28397-28617, 28920-29045, |
| | | | 29135-29296, 29411-29567, |
| | | | 29705-29787, 30224-30573 |
| 401781 | 7249190 | Minus | 83215-83435, 83531-83656, |
| | | | 83740-83901, 84237-84393, |
| | | | 84955-85037, 86290-86814 |
| 402230 | 9966312 | Minus | 29782-29932 |
| 402727 | 9211324 | Plus | 54596-54777 |
| 404875 | 9801324 | Plus | 96588-96732, 97722-97831 |
| 404977 | 3738341 | Minus | 43081-43229 |
| 405033 | 7107731 | Minus | 142358-142546 |
| 405506 | 6466489 | Plus | 80014-80401, 80593-81125 |

Pkey: Unique number corresponding to an Eos probeset
Ref: Sequence source. The 7 digit numbers in this column are Genbank Identifier (GI) numbers. “Dunham I. et al.” refers to the publication entitled “The DNA sequence of human chromosome 22.” Dunham I. et al., Nature (1999) 402: 489-495.
Strand: Indicates DNA strand from which exons were predicted.
Nt_position: Indicates nucleotide positions of predicted exons.

[0379] TABLE 7A
Genes downregulated in bladder cancer

| Pkey | ExAccn | UnigeneID | Unigene Title | R1 | R2 |
|---|---|---|---|---|---|
| 403010 | | | C21000152: gi\|6226483\|sp\|Q52118\|YMO3_ERWS | 4.86 | 2.49 |
| 426796 | S78234 | Hs.172405 | cell division cycle 27 | 4.28 | 2.48 |
| 416225 | AA577730 | Hs.188684 | ESTs, Weakly similar to PC4259 ferritin | 4.04 | 2.07 |
| 459006 | AW298631 | Hs.27721 | Wolf-Hirschhorn syndrome candidate 1-lik | 3.82 | 2.66 |
| 404917 | | | Target Exon | 3.78 | 2.00 |
| 426488 | X03350 | Hs.4 | alcohol dehydrogenase 1B (class I), beta | 2.64 | 1.79 |
| 419543 | AA244170 | | gb: nc05h02.s1 NCI_CGAP_Pr1 Homo sapiens | 2.63 | 3.42 |
| 453180 | N46243 | Hs.110373 | ESTs, Highly similar to T42626 secreted | 2.32 | 3.24 |
| 428957 | NM_003881 | Hs.194679 | WNT1 inducible signaling pathway protein | 2.20 | 3.80 |
| 451529 | AI917901 | Hs.208641 | ESTs | 2.18 | 3.69 |
| 417076 | AW973454 | Hs.238442 | ESTs, Moderately similar to ALU7_HUMAN A | 2.03 | 3.03 |
| 425438 | T62216 | Hs.270840 | ESTs | 2.00 | 5.17 |
| 450515 | AW304226 | | biphenyl hydrolase-like (serine hydrolas | 1.89 | 2.46 |
| 432873 | AW837268 | Hs.279639 | Homo sapiens mRNA; cDNA DKFZp586M2022 (f | 1.70 | 2.79 |
| 452123 | AI267615 | Hs.38022 | ESTs | 1.69 | 2.46 |
| 424378 | W28020 | Hs.167988 | neural cell adhesion molecule 1 | 1.65 | 4.67 |
| 437601 | AA761546 | Hs.248844 | ESTs, Weakly similar to ALU1_HUMAN ALU S | 1.50 | 3.34 |
| 402096 | | | ENSP00000217725*: Laminin alpha-1 chain p | 1.48 | 3.02 |
| 439563 | AI018768 | Hs.12482 | glyceronephosphate O-acyltransferase | 1.47 | 3.22 |
| 412810 | M21574 | Hs.74615 | platelet-derived growth factor receptor, | 1.46 | 2.30 |
| 458651 | AW612481 | Hs.104105 | ESTs | 1.39 | 2.89 |
| 414033 | AL079707 | Hs.207443 | hypothetical protein MGC10848 | 1.36 | 2.80 |
| 433572 | AL046859 | Hs.3407 | protein kinase (cAMP-dependent, catalyti | 1.35 | 3.49 |
| 413305 | NM_000426 | Hs.323511 | Homo sapiens cDNA: FLJ23176 fis, clone L | 1.34 | 2.93 |
| 420412 | AW976674 | Hs.125103 | ESTs | 1.32 | 5.13 |
| 421406 | AF179897 | Hs.104105 | Meis (mouse) homolog 2 | 1.31 | 4.07 |
| 417446 | AL118671 | Hs.82163 | monoamine oxidase B | 1.27 | 2.86 |
| 452886 | AI478250 | Hs.13751 | ESTs | 1.26 | 1.95 |
| 446808 | AA703226 | Hs.16193 | Homo sapiens mRNA; cDNA DKFZp586B211 (fr | 1.25 | 3.44 |
| 443105 | X96753 | Hs.9004 | chondroitin sulfate proteoglycan 4 (mela | 1.24 | 2.07 |
| 421348 | M94048 | Hs.103724 | peripheral myelin protein 22 | 1.24 | 2.63 |
| 433070 | N75346 | Hs.306121 | CDC20 (cell division cycle 20, S. cerevi | 1.23 | 2.80 |
| 420059 | AF161486 | Hs.94769 | RAB23, member RAS oncogene family | 1.22 | 3.43 |
| 408491 | AI088063 | Hs.7882 | ESTs | 1.20 | 6.01 |
| 447384 | AI377221 | Hs.40528 | ESTs | 1.00 | 7.92 |
| 421998 | R74441 | Hs.117176 | poly(A)-binding protein, nuclear 1 | 1.00 | 7.38 |
| 409619 | AK001015 | Hs.55220 | BCL2-associated athanogene 2 | 1.00 | 6.40 |
| 444795 | AI193356 | Hs.160316 | ESTs | 1.00 | 5.53 |
| 408495 | W68796 | Hs.237731 | ESTs | 1.00 | 5.05 |
| 417124 | BE122762 | Hs.25338 | ESTs | 1.00 | 4.73 |
| 443998 | AI620661 | Hs.296276 | ESTs | 1.00 | 4.39 |
| 406303 | | | C16000922: gi\|7499103\|pir∥T20903 hypothe | 1.00 | 4.37 |
| 422994 | AW891802 | Hs.296276 | ESTs | 1.00 | 4.37 |
| 422195 | AB007903 | Hs.113082 | KIAA0443 gene product | 1.00 | 4.35 |
| 452877 | AI250789 | Hs.32478 | ESTs | 1.00 | 3.90 |
| 452487 | AW207659 | Hs.6630 | Homo sapiens cDNA FLJ13329 fis, clone OV | 1.00 | 3.90 |
| 417159 | R01761 | | gb: ye81f10.s1 Soares fetal liver spleen | 1.00 | 3.82 |
| 445607 | AA488107 | Hs.30156 | ESTs, Weakly similar to unnamed protein | 1.00 | 3.62 |
| 406274 | | | Target Exon | 1.00 | 3.59 |
| 410611 | AW954134 | Hs.20924 | KIAA1628 protein | 1.00 | 3.06 |
| 426495 | NM_001151 | Hs.2043 | solute carrier family 25 (mitochondrial | 1.00 | 2.89 |
| 422292 | AI815733 | Hs.114360 | transforming growth factor beta-stimulat | 1.00 | 2.61 |
| 413040 | AA193338 | Hs.12321 | sodium calcium exchanger | 1.00 | 2.51 |
| 429623 | NM_005308 | Hs.211569 | G protein-coupled receptor kinase 5 | 1.00 | 2.05 |
| 456607 | AI660190 | Hs.106070 | cyclin-dependent kinase inhibitor 1C (p5 | 1.00 | 2.01 |
| 429143 | AA333327 | Hs.197335 | plasma glutamate carboxypeptidase | 0.97 | 2.45 |
| 400288 | X06256 | Hs.149609 | integrin, alpha 5 (fibronectin receptor, | 0.90 | 2.47 |
| 442498 | U54617 | Hs.8364 | Homo sapiens pyruvate dehydrogenase kina | 0.88 | 5.08 |
| 414449 | AA557660 | Hs.76152 | decorin | 0.88 | 3.13 |
| 412014 | AI620650 | Hs.43761 | ESTs, Weakly similar to A46010 X-linked | 0.78 | 1.88 |
| 425100 | AF051850 | Hs.154567 | supervillin | 0.70 | 3.90 |
| 432094 | AI658580 | Hs.61426 | Homo sapiens mesenchymal stem cell prote | 0.68 | 3.41 |
| 427818 | AW511222 | Hs.193765 | ESTs | 0.63 | 3.75 |

Pkey: Unique Eos probeset identifier number
ExAccn: Exemplar Accession number, Genbank accession number
UnigeneID: Unigene number
Unigene Title: Unigene gene title
R1 90th percentile of normal urothelium biopsy Als divided by 75th percentile of bladder tumor Ais
R2 90th percentile of normal urothelium biopsy and normal bladder Als divided by the 90th percentile bladder tumor Als

[0380] TABLE 7B

| Pkey | CAT Number | Accession |
|---|---|---|
| 417159 | 1653899_1 | R01761 R01760 N49787 |
| 419543 | 185745_1 | AA244170 AI018087 AA244355 |
| 450515 | 83710_1 | AW304226 AW008420 AA349212 H15015 AA317021 AI829484 H25661 H81744 AI906147 |
| | | AA837938 AW167766 AW603578 AW842369 BE439926 AA902417 AW235409 AA010062 AW069319 |
| | | AI280242 AW672925 H06848 H05608 R51905 R45023 AW675471 H28475 AI086597 |
| | | AI197815 AI825355 N99134 AI075956 AI470122 AA449985 AW662833 AA860423 AA913342 |
| | | T23825 AI394207 AI310319 T32467 AI589870 AI682293 AI810633 BE223045 H14620 |
| | | AA626645 AA876023 T33571 AA953982 AI138631 H15016 AI304356 AA983631 AI350990 |
| | | AI143993 AI708171 AA526961 H26247 W38485 AA847598 H81745 AW855486 BE299605 |
| | | AI079409 AI278050 AI223168 AI860904 AW025415 AI339003 AA393692 AI354302 AI492838 |
| | | N80194 AI015651 N34543 BE295397 AI085154 W24135 |

Pkey: Unique Eos probeset identifier number
CAT number: Gene cluster number
Accession: Genbank accession numbers

[0381] TABLE 7C

| Pkey | Ref | Strand | Nt_position |
|---|---|---|---|
| 402096 | 8117697 | Minus | 24993-25186 |
| 403010 | 3132346 | Plus | 78385-79052 |
| 404917 | 7341851 | Plus | 49330-49498 |
| 406274 | 7543787 | Plus | 932-1123 |
| 406303 | 8575868 | Plus | 173622-173786 |

Pkey: Unique number corresponding to an Eos probeset
Ref: Sequence source. The 7 digit numbers in this column are Genbank Identifier (GI) numbers. “Dunham I. et al.” refers to the publication entitled “The DNA sequence of human chromosome 22.” Dunham I. et al., Nature (1999) 402: 489-495.
Strand: Indicates DNA strand from which exons were predicted.
Nt_position: Indicates nucleotide positions of predicted exons.

[0382] TABLE 8A
Genes predictive of bladder cancer progression

| Pkey | ExAccn | UnigeneID | Unigene Title | R1 | R2 |
|---|---|---|---|---|---|
| 413324 | V00571 | Hs.75294 | corticotropin releasing hormone | 8.30 | 4.18 |
| 437802 | AI475995 | Hs.122910 | ESTs | 7.51 | 2.50 |
| 444444 | AI149332 | Hs.14855 | ESTs | 2.58 | 1.38 |
| 445033 | AV652402 | Hs.72901 | mucin 13, epithelial transmembrane | 2.26 | 1.13 |
| 417771 | AA804698 | Hs.82547 | retinoic acid receptor responder (tazaro | 3.27 | 5.33 |
| 449618 | AI076459 | Hs.15978 | KIAA1272 protein | 2.70 | 3.33 |
| 407242 | M18728 | | gb: Human nonspecific crossreacting antig | 3.58 | 1.90 |
| 418318 | U47732 | Hs.84072 | transmembrane 4 superfamily member 3 | 3.32 | 1.00 |
| 423441 | R68649 | Hs.278359 | absent in melanoma 1 like | 2.44 | 2.40 |
| 405033 | | | C1002652*: gi\|544327\|sp\|Q04799\|FMO5_RABlT | 1.75 | 3.48 |
| 423024 | AA593731 | Hs.325823 | ESTs, Moderately similar to ALU5_HUMAN A | 3.72 | 1.28 |
| 425118 | AU076611 | Hs.154672 | methylene tetrahydrofolate dehydrogenase | 2.40 | 2.78 |
| 437928 | NM_005476 | Hs.5920 | UDP-N-acetylglucosamine-2-epimerase/N-ac | 2.20 | 1.53 |
| 446584 | U53445 | Hs.15432 | downregulated in ovarian cancer 1 | 1.38 | 2.33 |
| 436608 | AA628980 | | down syndrome critical region protein DS | 3.32 | 4.53 |
| 404440 | | | NM_021048: Homo sapiens melanoma antigen, | 2.64 | 1.00 |
| 435602 | AF217515 | Hs.283532 | uncharacterized bone marrow protein BM03 | 2.06 | 1.09 |
| 424098 | AF077374 | Hs.139322 | small proline-rich protein 3 | 2.47 | 3.64 |
| 437553 | AI829935 | Hs.130497 | ESTs, Weakly similar to MAT8_HUMAN CHLOR | 2.09 | 0.91 |
| 428036 | AW068302 | | Homo sapiens mRNA for caldesmon, 3′ UTR | 2.71 | 4.58 |
| 446839 | BE091926 | Hs.16244 | mitotic spindle coiled-coil related prot | 3.18 | 2.33 |
| 448479 | H96115 | Hs.21293 | UDP-N-acteylglucosamine pyrophosphorylas | 2.61 | 1.81 |
| 412059 | AA317962 | Hs.249721 | ESTs, Moderately similar to PC4259 ferri | 1.90 | 2.02 |
| 401241 | AB028989 | | mitogen-activated protein kinase 8 inter | 1.26 | 2.55 |
| 408741 | M73720 | Hs.646 | carboxypeptidase A3 (mast cell) | 2.12 | 1.23 |
| 415989 | AI267700 | | ESTs | 1.60 | 1.00 |
| 431070 | AW408164 | Hs.249184 | transcription factor 19 (SC1) | 1.73 | 1.50 |
| 452140 | AB007928 | Hs.28169 | KIAA0459 protein | 2.44 | 2.95 |
| 443162 | T49951 | Hs.9029 | DKFZP434G032 protein | 2.98 | 1.00 |
| 435904 | AF261655 | Hs.8910 | 1,2-alpha-mannosidase IC | 2.56 | 1.20 |
| 407379 | AA332127 | Hs.325804 | transcription factor 17 | 2.10 | 1.72 |
| 442712 | BE465168 | Hs.131011 | ESTs | 2.54 | 2.72 |
| 411678 | AI907114 | Hs.71465 | squalene epoxidase | 1.12 | 3.11 |
| 406791 | AI220684 | Hs.347939 | hemoglobin, alpha 2 | 1.69 | 1.38 |
| 431805 | NM_014053 | Hs.270594 | FLVCR protein | 1.92 | 2.05 |
| 438414 | AA806794 | Hs.131511 | ESTs | 1.04 | 2.15 |
| 413924 | AL119964 | Hs.75616 | seladin-1 | 1.69 | 2.05 |
| 437679 | NM_014214 | Hs.5753 | inositol(myo)-1(or 4)-monophosphatase 2 | 2.27 | 2.26 |
| 445911 | AI985987 | Hs.145645 | ESTs, Moderately similar to ALU1_HUMAN A | 1.42 | 2.74 |
| 408349 | BE546947 | Hs.44276 | homeo box C10 | 1.60 | 2.05 |
| 422545 | X02761 | Hs.287820 | fibronectin 1 | 1.77 | 3.02 |
| 406643 | N77976 | Hs.347939 | hemoglobin, alpha 2 | 1.57 | 1.35 |
| 407228 | M25079 | Hs.155376 | hemoglobin, beta | 1.81 | 1.50 |
| 449644 | AW960707 | Hs.148324 | ESTs | 1.90 | 3.19 |
| 402305 | | | C19000735*: gi\|4508027\|ref\|NP_003414.1\|z | 2.25 | 1.49 |
| 427683 | BE545490 | Hs.15053 | Homo sapiens HCMOGT-1 mRNA for sperm ant | 1.08 | 2.25 |
| 441690 | R81733 | Hs.33106 | ESTs | 1.80 | 2.65 |
| 434487 | AF143867 | Hs.337588 | ESTs, Moderately similar to S65657 alpha | 2.13 | 1.63 |
| 403362 | | | NM_001615*: Homo sapiens actin, gamma 2, | 2.33 | 2.22 |
| 445496 | AB007860 | Hs.12802 | development and differentiation enhancin | 1.12 | 2.60 |
| 425234 | AW152225 | Hs.165909 | ESTs, Weakly similar to I38022 hypotheti | 1.83 | 3.05 |
| 402366 | AV648601 | | apolipoprotein B (including Ag(x) antige | 1.32 | 2.05 |
| 427254 | AL121523 | Hs.97774 | ESTs | 2.44 | 1.00 |
| 414533 | AA149060 | Hs.296100 | ESTs | 1.70 | 2.06 |
| 430157 | BE348706 | Hs.278543 | ESTs | 2.54 | 3.00 |
| 413433 | NM_003199 | Hs.326198 | transcription factor 4 | 2.26 | 1.41 |
| 410532 | T53088 | Hs.155376 | hemoglobin, beta | 1.52 | 1.56 |
| 405779 | | | NM_005367: Homo sapiens melanoma antigen, | 2.42 | 1.22 |
| 450455 | AL117424 | Hs.25035 | chloride intracellular channel 4 | 2.48 | 2.13 |
| 414081 | AW969976 | Hs.279009 | matrix Gla protein | 1.81 | 1.53 |
| 414761 | AU077228 | Hs.77256 | enhancer of zeste (Drosophila) homolog 2 | 1.65 | 2.08 |
| 415062 | H45100 | Hs.49753 | uveal autoantigen with coiled coil domai | 1.62 | 3.75 |
| 406317 | | | C2002658*: gi\|6625694\|gb\|AAF19354.1\|AF185 | 1.68 | 2.11 |
| 453259 | R93125 | Hs.124187 | ESTs | 1.08 | 2.25 |
| 445937 | AI452943 | Hs.321231 | UDP-Gal: betaGlcNAc beta 1,4-galactosylt | 1.76 | 1.01 |
| 434370 | AF130988 | Hs.58346 | ectodysplasin 1, anhidrotic receptor | 1.12 | 2.08 |
| 418058 | AW161552 | Hs.83381 | guanine nucleotide binding protein 11 | 2.02 | 2.40 |
| 432331 | W37862 | Hs.274368 | MSTP032 protein | 4.36 | 2.18 |
| 451736 | AW080356 | Hs.23889 | ESTs, Weakly similar to ALU7_HUMAN ALU S | 1.51 | 3.45 |
| 413109 | AW389845 | Hs.110855 | ESTs | 4.34 | 5.98 |
| 413643 | AA130987 | Hs.188727 | ESTs | 1.30 | 2.42 |
| 433217 | AB040914 | Hs.278628 | KIAA1481 protein | 1.70 | 2.49 |
| 435232 | NM_001262 | Hs.4854 | cyclin-dependent kinase inhibitor 2C (p1 | 1.79 | 1.66 |
| 438006 | BE148799 | Hs.127951 | hypothetical protein FLJ14503 | 1.76 | 2.04 |
| 410102 | AW248508 | Hs.279727 | ESTs; homologue of PEM-3 [Ciona savignyi | 2.32 | 2.45 |
| 433656 | AW974941 | Hs.292385 | ESTs, Weakly similar to I78885 serine/th | 1.14 | 2.50 |
| 415714 | NM_002290 | Hs.78672 | laminin, alpha 4 | 2.52 | 1.13 |
| 450282 | AA007655 | Hs.93523 | ESTs | 1.40 | 2.58 |
| 442855 | AI074465 | Hs.133469 | ESTs | 1.54 | 2.20 |
| 432917 | NM_014125 | Hs.241517 | PRO0327 protein | 2.24 | 3.03 |
| 429041 | AJ132820 | Hs.194768 | a disintegrin and metalloproteinase doma | 1.61 | 2.60 |
| 442807 | AL049274 | Hs.8736 | Homo sapiens mRNA; cDNA DKFZp564H203 (fr | 1.73 | 1.19 |
| 427719 | AI393122 | Hs.134726 | ESTs | 1.46 | 2.00 |
| 408778 | AI500519 | Hs.63382 | hypothetical protein PRO2714 | 1.46 | 2.58 |
| 418870 | AF147204 | Hs.89414 | chemokine (C-X-C motif), receptor 4 (fus | 1.40 | 2.03 |
| 424425 | AB031480 | Hs.146824 | SPR1 protein | 1.60 | 1.11 |
| 445391 | T92576 | Hs.191168 | ESTs | 1.69 | 2.40 |
| 446899 | NM_005397 | Hs.16426 | podocalyxin-like | 1.22 | 2.42 |
| 420996 | AK001927 | Hs.100895 | hypothetical protein FLJ10462 | 2.68 | 2.98 |
| 424909 | S78187 | Hs.153752 | cell division cycle 25B | 2.18 | 1.33 |
| 413593 | AA205248 | | gb: zq78c12.r1 Stratagene hNT neuron (937 | 1.69 | 2.00 |
| 408734 | AW264996 | Hs.254299 | ESTs | 2.06 | 2.94 |
| 413880 | AI660842 | Hs.110915 | interleukin 22 receptor | 1.24 | 2.20 |
| 437063 | AA351109 | Hs.5437 | Tax1 (human T-cell leukemia virus type I | 1.78 | 2.60 |
| 418044 | AI640532 | Hs.119830 | ESTs, Weakly similar to ALUF_HUMAN !!!! | 1.54 | 2.53 |
| 441971 | W27060 | Hs.265855 | ESTs | 1.62 | 2.13 |
| 450401 | AW959281 | Hs.8184 | ESTs | 1.42 | 2.30 |
| 440157 | AA868350 | Hs.343636 | ESTs | 1.38 | 2.60 |
| 457587 | AA992841 | Hs.27263 | KIAA1458 protein | 1.47 | 2.42 |
| 440707 | BE256751 | Hs.22867 | Homo sapiens cDNA: FLJ22073 fis, clone H | 1.18 | 2.10 |
| 402241 | | | Target Exon | 2.58 | 2.52 |
| 413428 | AA430155 | Hs.151343 | KIAA1524 protein | 1.22 | 2.45 |
| 416735 | R11275 | Hs.194485 | ESTs | 1.14 | 2.14 |
| 421582 | AI910275 | | trefoil factor 1 (breast cancer, estroge | 1.25 | 1.03 |
| 431031 | AA830335 | Hs.105273 | ESTs | 2.35 | 2.95 |
| 433336 | AF017986 | Hs.31386 | secreted frizzled-related protein 2 | 3.72 | 1.00 |
| 420786 | AW296466 | Hs.43628 | deleted in lymphocytic leukemia, 2 | 1.23 | 2.60 |
| 401335 | | | Target Exon | 1.18 | 1.68 |
| 417670 | R07785 | | gb: yf15c06.r1 Soares fetal liver spleen | 1.56 | 2.00 |
| 406314 | | | C14001020: gi\|12597441\|gb\|AAG60049.1\|AF31 | 1.60 | 3.08 |
| 458981 | AW968318 | Hs.285996 | hypothetical protein FLJ23375 | 1.70 | 2.50 |
| 417509 | AA203414 | Hs.42009 | ESTs | 1.82 | 2.05 |
| 452732 | BE300078 | Hs.80449 | Homo sapiens, clone IMAGE: 3535294, mRNA, | 1.34 | 1.37 |
| 418678 | NM_001327 | Hs.87225 | cancer/testis antigen (NY-ESO-1) | 1.37 | 1.02 |
| 457871 | AI168278 | | ESTs | 1.20 | 2.19 |
| 444163 | AI126098 | | gb: qc54g07.x1 Soares_placent_8to9weeks_{—} | 1.43 | 1.22 |
| 413276 | Z24725 | Hs.75260 | mitogen inducible 2 | 1.78 | 2.28 |
| 421097 | AI280112 | Hs.125232 | Homo sapiens cDNA FLJ13266 fis, clone OV | 2.55 | 2.60 |
| 417151 | AA194055 | Hs.293858 | ESTs | 1.68 | 1.67 |
| 453556 | AA425414 | Hs.33287 | nuclear factor I/B | 2.06 | 2.40 |
| 440859 | AW070865 | Hs.346390 | ESTs | 1.12 | 1.70 |
| 420629 | AW204343 | Hs.156823 | ESTs, Weakly similar to T30868 RhoA-bind | 1.21 | 2.38 |
| 422363 | T55979 | Hs.115474 | replication factor C (activator 1) 3 (38 | 1.58 | 2.15 |
| 434831 | AA248060 | Hs.273397 | KIAA0710 gene product | 1.69 | 1.78 |
| 412055 | AA099907 | Hs.271806 | ESTs, Weakly similar to ALU1_HUMAN ALU S | 1.36 | 2.65 |
| 445468 | AW450439 | | ESTs | 1.52 | 2.50 |
| 444550 | BE250716 | Hs.87614 | ESTs | 1.30 | 2.28 |
| 417259 | AW903838 | Hs.81800 | chondroitin sulfate proteoglycan 2 (vers | 1.50 | 3.02 |
| 430233 | AW367902 | Hs.236443 | Homo sapiens mRNA; cDNA DKFZp564N1063 (f | 1.24 | 2.95 |
| 413444 | BE141019 | | gb: MR0-HT0067-201099-002-b10 HT0067 Homo | 1.68 | 2.80 |
| 433844 | AA610175 | Hs.179647 | Homo sapiens cDNA FLJ12195 fis, clone MA | 1.49 | 2.01 |
| 427055 | AI301740 | Hs.173381 | dihydropyrimidinase-like 2 | 1.11 | 2.58 |
| 454244 | R51604 | Hs.300842 | KIAA1608 protein | 1.00 | 2.02 |
| 429503 | AA394183 | Hs.26873 | ESTs | 2.58 | 4.08 |
| 422940 | BE077458 | | gb: RC1-BT0606-090500-015-b04 BT0606 Homo | 3.48 | 2.46 |
| 407949 | W21874 | Hs.247057 | ESTs, Weakly similar to 2109260A B cell | 3.13 | 1.48 |
| 437312 | AA809350 | Hs.246180 | ESTs | 1.10 | 2.05 |
| 449426 | T92251 | Hs.198882 | ESTs | 1.22 | 2.08 |
| 447620 | AW290951 | Hs.224965 | ESTs | 1.80 | 2.18 |
| 444700 | NM_003645 | Hs.11729 | fatty-acid-Coenzyme A ligase, very long- | 1.72 | 2.81 |
| 436258 | AW867491 | Hs.107125 | plasmalemma vesicle associated protein | 1.99 | 1.80 |
| 415712 | AW249188 | Hs.169577 | Homo sapiens cDNA FLJ14743 fis, clone NT | 1.66 | 2.98 |
| 432877 | AW974111 | Hs.292477 | ESTs | 1.63 | 2.79 |
| 412085 | AW891667 | | gb: CM3-NT0089-110500-179-h09 NT0089 Homo | 1.40 | 2.08 |
| 431421 | AW969118 | Hs.108144 | ESTs, Weakly similar to unnamed protein | 1.96 | 3.58 |
| 409714 | AW367812 | Hs.199961 | ESTs, Weakly similar to ALU7_HUMAN ALU S | 1.24 | 2.10 |
| 423013 | AW875443 | Hs.22209 | secreted modular calcium-binding protein | 1.49 | 2.09 |
| 422663 | AW500087 | Hs.119014 | zinc finger protein 175 | 1.01 | 2.78 |
| 439737 | AI751438 | Hs.41271 | Homo sapiens mRNA full length insert cDN | 1.54 | 2.57 |
| 413196 | AA127386 | | gb: zn90d09.r1 Stratagene lung carcinoma | 1.04 | 2.18 |
| 439349 | AI660898 | Hs.195602 | ESTs | 2.03 | 2.43 |
| 443005 | AI027184 | Hs.200918 | ESTs | 1.42 | 2.10 |
| 424762 | AL119442 | Hs.183684 | eukaryotic translation initiation factor | 2.58 | 3.43 |
| 427373 | AB007972 | Hs.130760 | myosin phosphatase, target subunit 2 | 2.08 | 1.70 |
| 413916 | N49813 | Hs.75615 | apolipoprotein C-II | 0.70 | 0.42 |
| 418332 | R34976 | Hs.78293 | ESTs | 2.74 | 2.43 |
| 426552 | BE297660 | Hs.170328 | moesin | 1.28 | 1.52 |
| 456583 | AF179897 | Hs.104105 | Meis (mouse) homolog 2 | 1.42 | 2.02 |
| 447214 | AI367288 | Hs.273621 | Homo sapiens cDNA: FLJ21350 fis, clone C | 1.14 | 2.10 |
| 449254 | W26908 | Hs.172762 | ESTs | 2.04 | 2.50 |
| 443651 | W22152 | Hs.282929 | ESTs | 2.94 | 3.08 |
| 421021 | AA808018 | Hs.109302 | ESTs | 1.41 | 2.04 |
| 419741 | NM_007019 | Hs.93002 | ubiquitin carrier protein E2-C | 1.61 | 1.21 |
| 432027 | AL096678 | Hs.272353 | KIAA0957 protein | 1.70 | 2.76 |
| 452688 | AA721140 | Hs.49930 | ESTs, Weakly similar to putative p150 [H | 1.80 | 2.95 |
| 417042 | C75563 | Hs.113029 | ribosomal protein S25 | 2.22 | 3.20 |
| 443574 | U83993 | Hs.321709 | purinergic receptor P2X, ligand-gated io | 1.21 | 2.51 |
| 429372 | AA451859 | Hs.99253 | ESTs | 1.28 | 2.43 |
| 424290 | AA338396 | | gb: EST43386 Fetal brain I Homo sapiens c | 1.82 | 2.03 |
| 428518 | AW969656 | | gb: EST381733 MAGE resequences, MAGK Homo | 1.72 | 2.52 |
| 455649 | BE065051 | | gb: RC1-BT0313-110500-017-c04 BT0313 Homo | 1.65 | 3.03 |
| 414665 | AA160873 | Hs.332053 | serum amyloid A1 | 1.36 | 1.08 |
| 418298 | AA256014 | Hs.86682 | Homo sapiens cDNA: FLJ21578 fis, clone C | 1.04 | 2.03 |
| 429655 | U48959 | Hs.211582 | myosin, light polypeptide kinase | 4.94 | 4.34 |
| 433924 | AA618304 | Hs.258785 | ESTs | 1.44 | 2.40 |
| 452683 | AI089575 | Hs.9071 | progesterone membrane binding protein | 1.48 | 2.48 |
| 439437 | AI207788 | Hs.343628 | sialyltransferase 4B (beta-galactosidase | 1.36 | 2.33 |
| 432314 | AA533447 | Hs.312989 | ESTs | 0.96 | 2.78 |
| 400881 | | | NM_025080: Homo sapiens hypothetical prot | 1.70 | 3.15 |
| 426477 | AA379464 | | gb: EST92386 Skin tumor I Homo sapiens cD | 2.01 | 2.37 |
| 454741 | BE154396 | | gb: CM2-HT0342-091299-050-b05 HT0342 Homo | 2.12 | 3.44 |
| 423977 | AA333232 | | gb: EST37283 Embryo, 8 week I Homo sapien | 1.38 | 2.13 |
| 450396 | AU077002 | Hs.24950 | regulator of G-protein signalling 5 | 2.13 | 3.28 |
| 431842 | NM_005764 | Hs.271473 | epithelial protein up-regulated in carci | 1.90 | 2.23 |
| 415157 | D63257 | | gb: HUM514B08B Clontech human placenta po | 1.29 | 2.90 |
| 418236 | AW994005 | Hs.337534 | ESTs | 1.74 | 2.37 |
| 454390 | AB020713 | Hs.56966 | KIAA0906 protein | 1.47 | 1.38 |
| 436143 | AA705245 | Hs.192189 | ESTs | 1.46 | 2.45 |
| 436251 | BE515065 | Hs.296585 | nucleolar protein (KKE/D repeat) | 1.43 | 2.07 |
| 450735 | AI732321 | | SRY (sex determining region Y)-box 4 | 1.36 | 2.02 |
| 420136 | AW801090 | Hs.195851 | actin, alpha 2, smooth muscle, aorta | 2.70 | 1.68 |
| 447100 | AI361801 | Hs.167130 | hypothetical protein | 1.66 | 2.03 |
| 453577 | AL043049 | | gb: DKFZp434A1523_r1 434 (synonym: htes3) | 1.41 | 2.75 |
| 408522 | AI541214 | Hs.46320 | Small proline-rich protein SPRK [human, | 1.59 | 1.38 |
| 412632 | AL120379 | Hs.74294 | aldehyde dehydrogenase 7 family, member | 1.81 | 2.51 |
| 423291 | NM_004129 | Hs.126590 | guanylate cyclase 1, soluble, beta 2 | 1.54 | 2.83 |
| 456172 | R99050 | | gb: yq65c02.r1 Soares fetal liver spleen | 1.46 | 2.68 |
| 452123 | AI267615 | Hs.38022 | ESTs | 1.24 | 1.93 |
| 433900 | AA721668 | Hs.257761 | ESTs | 1.78 | 2.66 |
| 408436 | R31954 | Hs.7885 | phosphatidylinositol binding clathrin as | 1.21 | 2.35 |
| 417123 | BE326521 | Hs.159450 | ESTs | 1.46 | 2.09 |
| 436023 | T81819 | Hs.302251 | ESTs | 2.68 | 2.70 |
| 454150 | AA131893 | Hs.154088 | hypothetical protein FLJ22756 | 1.40 | 2.50 |
| 444094 | AI695764 | Hs.202394 | ESTs | 1.28 | 4.03 |
| 429176 | AW975021 | Hs.193800 | ESTs | 1.08 | 2.53 |
| 422259 | AA307584 | | gb: EST178498 Colon carcinoma (HCC) cell | 1.80 | 3.03 |
| 451164 | AA015912 | Hs.60659 | ESTs, Weakly similar to T46471 hypotheti | 1.47 | 1.17 |
| 417501 | AL041219 | Hs.82222 | sema domain, immunoglobulin domain (lg), | 2.92 | 2.70 |
| 455642 | BE063965 | | gb: QV3-BT0296-140200-085-h01 BT0296 Homo | 1.70 | 2.70 |
| 443387 | BE139135 | Hs.254629 | ESTs | 1.48 | 2.32 |
| 420995 | AA282495 | Hs.89014 | ESTs | 1.45 | 1.51 |
| 407329 | AA576061 | Hs.269834 | ESTs, Weakly similar to ALUD_HUMAN !!!! | 1.13 | 2.38 |
| 438797 | C16161 | Hs.283040 | hypothetical protein PRO2543 | 0.99 | 2.75 |
| 443357 | AW016773 | | low molecular mass ubiquinone-binding pr | 1.60 | 2.08 |
| 412656 | AF006011 | Hs.74375 | dishevelled 1 (homologous to Drosophila | 1.32 | 1.13 |
| 427377 | AU077029 | Hs.177543 | antigen identified by monoclonal antibod | 1.24 | 0.79 |
| 412200 | R08110 | Hs.187462 | ESTs, Weakly similar to I38022 hypotheti | 1.35 | 1.54 |
| 432586 | AA568548 | | ESTs | 1.50 | 2.25 |
| 411590 | T96183 | | gb: ye09f07.s1 Stratagene lung (937210) H | 1.22 | 2.53 |
| 422672 | X12784 | Hs.119129 | collagen, type IV, alpha 1 | 2.27 | 2.20 |
| 420256 | U84722 | Hs.76206 | cadherin 5, type 2, VE-cadherin (vascula | 1.59 | 2.11 |
| 419900 | AI469960 | Hs.170698 | ESTs | 1.30 | 2.68 |
| 410805 | AW804742 | Hs.84264 | acidic protein rich in leucines | 1.16 | 2.28 |
| 452560 | BE077084 | Hs.99969 | ESTs | 1.44 | 2.58 |
| 448429 | D17408 | Hs.21223 | calponin 1, basic, smooth muscle | 4.02 | 1.00 |
| 424436 | AW818428 | Hs.4953 | golgi autoantigen, golgin subfamily a, 3 | 1.10 | 2.00 |
| 447400 | AK000322 | Hs.18457 | hypothetical protein FLJ20315 | 1.45 | 1.28 |
| 422522 | AI023428 | Hs.34549 | ESTs, Highly similar to S94541 1 clone 4 | 1.82 | 2.10 |
| 443696 | AW607444 | Hs.134622 | ESTs | 1.98 | 2.01 |
| 436094 | AI798701 | Hs.222222 | ESTs | 1.34 | 2.40 |
| 420168 | AF217508 | Hs.95594 | serine carboxypeptidase vitellogenic-lik | 1.58 | 2.45 |
| 430325 | AF004562 | Hs.239356 | syntaxin binding protein 1 | 1.34 | 2.43 |
| 439022 | AA356599 | Hs.173904 | ESTs | 2.76 | 2.40 |
| 420563 | AA278327 | Hs.136237 | ESTs, Moderately similar to Y140_HUMAN H | 1.78 | 2.65 |
| 429494 | AA769365 | Hs.126058 | ESTs | 1.50 | 2.40 |
| 420689 | H79979 | Hs.88678 | ESTs | 1.26 | 2.28 |
| 448988 | Y09763 | Hs.22785 | gamma-aminobutyric acid (GABA) A recepto | 1.72 | 1.29 |
| 439943 | AW083789 | Hs.124620 | ESTs | 1.45 | 2.84 |
| 442300 | AI765908 | Hs.129166 | ESTs | 1.24 | 2.35 |
| 449614 | AI989490 | Hs.197703 | ESTs | 1.12 | 2.22 |
| 444363 | AI142827 | Hs.143656 | ESTs | 1.32 | 2.08 |
| 424479 | AF064238 | Hs.149098 | smoothelin | 1.59 | 1.10 |
| 437321 | AA768966 | Hs.292026 | ESTs, Weakly similar to 2109260A B cell | 1.28 | 2.07 |
| 431926 | AW972724 | | gb: EST384816 MAGE resequences, MAGL Homo | 1.52 | 2.63 |
| 433640 | AW390125 | Hs.240443 | Homo sapiens cDNA: FLJ23538 fis, clone L | 1.69 | 1.30 |
| 415901 | H08396 | Hs.76118 | ubiquitin carboxyl-terminal esterase L1 | 1.71 | 2.19 |
| 437199 | AL110175 | Hs.306337 | Homo sapiens mRNA; cDNA DKFZp564H0616 (f | 1.48 | 2.50 |
| 457450 | AW294163 | Hs.146127 | ESTs | 1.07 | 2.60 |
| 456678 | AF141305 | Hs.173736 | ancient ubiquitous protein 1 | 1.44 | 2.35 |
| 451079 | AI827988 | Hs.240728 | ESTs, Moderately similar to PC4259 ferri | 0.95 | 3.00 |
| 405944 | | | Target Exon | 1.48 | 2.45 |
| 408877 | AA479033 | Hs.130315 | ESTs, Weakly similar to A47582 B-cell gr | 1.38 | 2.20 |
| 446682 | AW205632 | Hs.211198 | ESTs | 1.38 | 3.00 |
| 431380 | AW610282 | Hs.291003 | ESTs | 1.43 | 2.64 |
| 442027 | AI652926 | Hs.128395 | ESTs | 1.18 | 2.43 |
| 423578 | AW960454 | Hs.222830 | ESTs | 1.56 | 2.18 |
| 441495 | AW294603 | Hs.127039 | ESTs | 2.80 | 1.73 |
| 417900 | BE250127 | Hs.82906 | CDC20 (cell division cycle 20, S. cerevi | 1.36 | 1.18 |
| 443949 | AW827419 | Hs.235070 | ESTs | 1.30 | 2.28 |
| 440495 | AA887212 | Hs.14161 | hypothetical protein DKFZp434I1930 | 1.74 | 2.78 |
| 449948 | R19156 | Hs.20798 | ESTs | 1.12 | 2.23 |
| 439564 | W77911 | Hs.110006 | ESTs | 1.34 | 2.85 |
| 423225 | AA852604 | Hs.125359 | Thy-1 cell surface antigen | 1.24 | 1.09 |
| 436139 | AA765786 | Hs.120936 | ESTs | 1.30 | 2.10 |
| 456968 | AI174861 | Hs.190623 | ESTs | 1.14 | 2.15 |
| 437191 | NM_006846 | Hs.331555 | serine protease inhibitor, Kazal type, 5 | 1.21 | 2.18 |
| 411652 | AW855393 | | gb: CM3-CT0275-191099-024-f10 CT0275 Homo | 1.85 | 1.94 |
| 420732 | AA789133 | Hs.88650 | ESTs | 1.66 | 2.71 |
| 409291 | AW373472 | | gb: RC3-BT0523-181299-011-d12 BT0523 Homo | 1.56 | 2.30 |
| 424415 | NM_001975 | Hs.146580 | enolase 2, (gamma, neuronal) | 1.56 | 1.39 |
| 424927 | AW973666 | Hs.153850 | hypothetical protein C321D2.4 | 1.58 | 1.24 |
| 450946 | AA374569 | Hs.127698 | ESTs, Moderately similar to 2109260A B c | 1.02 | 2.25 |
| 428423 | AU076517 | Hs.184276 | solute carrier family 9 (sodium/hydrogen | 1.70 | 2.39 |
| 415361 | F06724 | | gb: HSC1IG021 normalized infant brain cDN | 1.34 | 2.40 |
| 406490 | | | C5001926: gi\|7511572\|pir∥T42245 probable | 1.28 | 2.40 |
| 410855 | X97795 | Hs.66718 | RAD54 (S. cerevisiae)-like | 1.52 | 2.00 |
| 440010 | AA534930 | Hs.127236 | hypothetical protein FLJ12879 | 1.12 | 2.20 |
| 429508 | AW369620 | Hs.33944 | ESTs, Weakly similar to ALU1_HUMAN ALU S | 1.33 | 2.28 |
| 426340 | Z97989 | Hs.169370 | FYN oncogene related to SRC, FGR, YES | 1.88 | 2.18 |
| 416889 | AW250318 | Hs.80395 | mal, T-cell differentiation protein | 1.65 | 1.16 |
| 451870 | AI820991 | Hs.8377 | ESTs | 1.24 | 2.03 |
| 444091 | AV647924 | Hs.282376 | ESTs | 1.05 | 2.13 |
| 410793 | AW581906 | Hs.66392 | intersectin 1 (SH3 domain protein) | 2.00 | 3.13 |
| 452222 | AW806287 | Hs.21432 | SEX gene | 1.25 | 1.10 |
| 433010 | AW970018 | | gb: EST382097 MAGE resequences, MAGK Homo | 1.36 | 2.41 |
| 432674 | AA641092 | Hs.257339 | ESTs, Weakly similar to I38022 hypotheti | 1.14 | 2.03 |
| 438855 | AW946276 | Hs.6441 | Homo sapiens mRNA; cDNA DKFZp586J021 (fr | 2.24 | 1.77 |
| 448718 | AA220235 | Hs.153959 | hypothetical protein MGC15436 | 1.52 | 2.65 |
| 402685 | | | Target Exon | 2.04 | 2.46 |
| 424528 | AW073971 | Hs.238954 | ESTs, Weakly similar to KIAA1204 protein | 1.66 | 2.05 |
| 422068 | AI807519 | Hs.104520 | Homo sapiens cDNA FLJ13694 fis, clone PL | 1.89 | 4.98 |
| 451225 | AI433694 | Hs.293608 | ESTs | 1.79 | 2.70 |
| 441078 | AI453268 | Hs.323409 | Homo sapiens cDNA FLJ14113 fis, clone MA | 1.44 | 2.58 |
| 409406 | H83092 | Hs.49605 | ESTs | 1.38 | 2.05 |
| 422297 | AW961290 | | p30 DBC protein | 1.20 | 2.73 |
| 408711 | AW376061 | Hs.63335 | ESTs, Moderately similar to A46010 X-lin | 1.20 | 2.08 |
| 426696 | AW363332 | Hs.171844 | Homo sapiens cDNA: FLJ22296 fis, clone H | 1.35 | 2.68 |
| 417324 | AW265494 | | ESTs | 1.68 | 1.25 |
| 408283 | BE141579 | | gb: QV2-HT0083-071299-018-b05 HT0083 Homo | 1.25 | 2.65 |
| 415166 | NM_003652 | Hs.78068 | carboxypeptidase Z | 1.34 | 1.09 |
| 406300 | | | Target Exon | 1.61 | 2.47 |
| 411880 | AW872477 | | gb: hm30f03.x1 NCI_CGAP_Thy4 Homo sapiens | 3.60 | 4.03 |
| 422287 | F16365 | Hs.114346 | cytochrome c oxidase subunit Vlla polype | 2.16 | 1.44 |
| 422567 | AF111178 | Hs.118407 | glypican 6 | 1.57 | 2.03 |
| 436855 | AA732624 | Hs.165852 | ESTs | 1.08 | 2.75 |
| 403536 | | | Target Exon | 0.93 | 2.13 |
| 447733 | AF157482 | Hs.19400 | MAD2 (mitotic arrest deficient, yeast, h | 1.18 | 1.07 |
| 417117 | N46778 | | gb: yy52b02.r1 Soares_multiple_sclerosis_{—} | 1.70 | 2.85 |
| 411690 | AA669253 | Hs.136075 | RNA, U2 small nuclear | 2.12 | 2.78 |
| 443243 | AI452496 | Hs.132056 | ESTs | 1.15 | 2.83 |
| 423074 | AL109963 | | FSH primary response (LRPR1, rat) homolo | 1.37 | 1.43 |
| 408916 | AW295232 | Hs.429 | ATP synthase, H transporting, mitochondr | 1.63 | 2.23 |
| 449799 | AI143466 | Hs.125060 | ESTs | 1.40 | 2.08 |
| 415378 | T16964 | | gb: NIB2079-5R Normalized infant brain, B | 1.88 | 1.85 |
| 431089 | BE041395 | | ESTs, Weakly similar to unknown protein | 1.57 | 2.57 |
| 434959 | AW974949 | Hs.186564 | ESTs, Weakly similar to I38022 hypotheti | 1.30 | 2.30 |
| 416311 | D80529 | | gb: HUM081H05B Human fetal brain (TFujiwa | 1.58 | 4.35 |
| 444614 | R44284 | Hs.2730 | heterogeneous nuclear ribonucleoprotein | 1.88 | 2.98 |
| 456206 | NM_006895 | Hs.81182 | histamine N-methyltransferase | 1.24 | 2.08 |
| 410583 | AW770280 | Hs.36258 | ESTs, Moderately similar to JC5238 galac | 1.56 | 4.33 |
| 430410 | AF099144 | Hs.334455 | tryptase beta 1 | 1.91 | 1.58 |
| 408139 | AA451966 | | RAB9-like protein | 1.42 | 2.14 |
| 432621 | AI298501 | Hs.12807 | ESTs, Weakly similar to T46428 hypotheti | 2.08 | 1.94 |
| 441584 | AW148329 | Hs.175208 | ESTs | 1.12 | 2.05 |
| 445940 | D60438 | Hs.34779 | ESTs | 1.86 | 2.70 |
| 453022 | AA031499 | Hs.118489 | ESTs | 2.02 | 1.75 |
| 444008 | BE544855 | Hs.236572 | ESTs, Weakly similar to SFR4_HUMAN SPLIC | 1.54 | 1.29 |
| 442994 | AI026718 | Hs.16954 | ESTs | 3.60 | 3.78 |
| 402085 | | | C18000504*: gi\|2627436\|gb\|AAB86683.1\| (AF | 1.36 | 2.53 |
| 411918 | AW876354 | | gb: PM4-PT0019-141299-009-F08 PT0019 Homo | 2.00 | 2.63 |
| 455508 | AW976165 | | gb: EST388274 MAGE resequences, MAGN Homo | 1.70 | 3.04 |
| 426106 | AI678765 | Hs.21812 | ESTs | 1.49 | 2.11 |
| 425131 | BE252230 | Hs.99163 | ESTs | 2.04 | 2.65 |
| 440325 | NM_003812 | Hs.7164 | a disintegrin and metalloproteinase doma | 1.17 | 2.55 |
| 420447 | AA687306 | Hs.88448 | ESTs | 1.66 | 2.58 |
| 428055 | AA420564 | Hs.101760 | ESTs | 1.08 | 2.15 |
| 422110 | AI376736 | Hs.111779 | secreted protein, acidic, cysteine-rich | 1.76 | 1.82 |
| 438581 | AW977766 | Hs.292133 | ESTs, Moderately similar to I78885 serin | 1.08 | 2.10 |
| 403290 | | | C1000101*: gi\|4758212\|ref\|NP_004411.1\| d | 0.97 | 2.48 |
| 408175 | W29089 | Hs.19066 | hypothetical protein DKFZp667O2416 | 1.42 | 1.41 |
| 432390 | AA936177 | Hs.274460 | olfactory receptor, family 5, subfamily | 1.26 | 2.05 |
| 443441 | AW291196 | Hs.92195 | ESTs | 1.52 | 2.13 |
| 419925 | AA159850 | Hs.93765 | lipoma HMGIC fusion partner | 1.72 | 2.80 |
| 445256 | AI858635 | Hs.144763 | ESTs | 1.97 | 3.33 |
| 456381 | AA236606 | | gb: zr99b10.r1 NCI_CGAP_GCB1 Homo sapiens | 1.16 | 1.95 |
| 422433 | AA310560 | Hs.153746 | hypothetical protein FLJ22490 | 1.06 | 2.20 |
| 432529 | AI989507 | Hs.162245 | ESTs | 1.36 | 2.25 |
| 424951 | AW964082 | | gb: EST376155 MAGE resequences, MAGH Homo | 2.22 | 2.58 |
| 420785 | H89633 | Hs.191346 | ESTs | 1.26 | 2.15 |
| 411347 | AW838126 | | gb: QV2-LT0051-240300-097-f01 LT0051 Homo | 1.38 | 2.38 |
| 438742 | AW204126 | Hs.196543 | ESTs | 1.10 | 2.30 |
| 414900 | AW452420 | Hs.248678 | ESTs | 2.01 | 3.08 |
| 443284 | AI369813 | Hs.64783 | ESTs, Weakly similar to T42705 hypotheti | 0.66 | 0.43 |
| 402049 | | | Target Exon | 2.28 | 2.00 |
| 429400 | AW604940 | Hs.201668 | transcription factor 20 (AR1) | 1.16 | 2.00 |
| 423916 | AW993496 | Hs.17235 | Homo sapiens clone TCCCIA00176 mRNA sequ | 1.59 | 1.05 |
| 432495 | AW973537 | Hs.186734 | ESTs, Weakly similar to I61746 pheromone | 1.50 | 2.05 |
| 414840 | R27319 | Hs.23823 | hairy/enhancer-of-split related with YRP | 1.89 | 2.09 |
| 428711 | R46414 | Hs.56828 | trinucleotide repeat containing 5 | 1.77 | 1.83 |
| 448609 | AW139420 | Hs.7972 | KIAA0871 protein | 1.14 | 2.26 |
| 443859 | NM_013409 | Hs.9914 | follistatin | 1.17 | 1.05 |
| 411141 | AW819561 | | gb: RC5-ST0293-140200-013-G04 ST0293 Homo | 1.44 | 2.40 |
| 440116 | AI798851 | Hs.266959 | hemoglobin, gamma G | 1.18 | 2.08 |
| 417944 | AU077196 | Hs.82985 | collagen, type V, alpha 2 | 2.10 | 1.37 |
| 429640 | U83508 | Hs.2463 | angiopoietin 1 | 1.92 | 2.98 |
| 410064 | X53416 | Hs.195464 | filamin A, alpha (actin-binding protein- | 1.51 | 1.29 |
| 458218 | AI435179 | Hs.126820 | ESTs | 1.49 | 1.15 |
| 443114 | AI033377 | Hs.153298 | ESTs | 1.38 | 2.05 |
| 427788 | AA412397 | Hs.116858 | ESTs | 1.45 | 1.85 |
| 435913 | W95006 | Hs.269559 | ESTs, Weakly similar to S65657 alpha-1C- | 1.63 | 3.90 |
| 457949 | W69171 | Hs.71741 | ESTs, Highly similar to I38945 melanoma | 1.01 | 2.00 |
| 419203 | AA488719 | Hs.190151 | ESTs | 1.94 | 2.45 |
| 412510 | AI056689 | Hs.133538 | ESTs, Weakly similar to ALU1_HUMAN ALU S | 1.91 | 2.20 |
| 413885 | BE177442 | | gb: RC1-HT0595-200400-012-f01 HT0595 Homo | 1.48 | 2.80 |
| 426239 | AA669615 | Hs.214226 | ESTs | 1.36 | 2.50 |
| 408866 | AW292096 | Hs.255036 | ESTs | 1.93 | 2.92 |
| 412857 | AI703484 | Hs.128052 | ESTs | 1.72 | 1.60 |
| 427340 | BE167242 | Hs.47099 | hypothetical protein FLJ21212 | 1.46 | 2.13 |
| 412902 | BE008018 | | gb: QV0-BN0147-290400-214-c01 BN0147 Homo | 0.90 | 2.05 |
| 451141 | AW772713 | Hs.247186 | ESTs | 2.38 | 3.95 |
| 412626 | AA114945 | Hs.151839 | ESTs | 1.75 | 2.15 |
| 405667 | | | Target Exon | 2.62 | 3.79 |
| 417777 | AI823763 | Hs.7055 | ESTs, Weakly similar to I78885 serine/th | 1.24 | 2.08 |
| 401400 | | | Target Exon | 1.16 | 1.90 |
| 426796 | S78234 | Hs.172405 | cell division cycle 27 | 2.14 | 1.63 |
| 435046 | AA662772 | Hs.174330 | ESTs, Weakly similar to ALU1_HUMAN ALU S | 1.14 | 2.28 |
| 448401 | AI498509 | Hs.346254 | ESTs | 2.50 | 2.83 |
| 450832 | AW970602 | Hs.105421 | ESTs | 0.55 | 0.39 |
| 441057 | AL043897 | Hs.126483 | ESTs | 1.08 | 2.13 |
| 438725 | AA815163 | Hs.127307 | ESTs | 1.31 | 2.65 |
| 450062 | AW001043 | Hs.200854 | ESTs | 1.30 | 2.48 |
| 441214 | AI820648 | Hs.129136 | ESTs | 1.43 | 1.71 |
| 431723 | AW058350 | Hs.16762 | Homo sapiens mRNA; cDNA DKFZp564B2062 (f | 1.22 | 2.30 |
| 414907 | X90725 | Hs.77597 | polo (Drosophia)-like kinase | 1.35 | 1.49 |
| 423622 | BE154847 | | gb: PM1-HT0345-121199-001-d05 HT0345 Homo | 1.57 | 2.30 |
| 450835 | BE262773 | Hs.25584 | hypothetical protein FLJ10767 | 1.40 | 1.12 |
| 444014 | AI095718 | Hs.135015 | ESTs | 2.30 | 1.78 |
| 431603 | AA807955 | Hs.325984 | EST | 1.26 | 2.03 |
| 408697 | AW419069 | Hs.209670 | ESTs | 1.35 | 2.60 |
| 444312 | R44007 | | ESTs | 1.95 | 2.07 |
| 404286 | | | C6001909: gi\|704441\|dbj\|BAA18909.1\|(D298 | 2.29 | 2.22 |
| 438813 | M27346 | | gb: Homo sapiens (clone HGP09/HGP32) T ce | 1.03 | 2.43 |
| 445534 | AL038823 | Hs.12840 | Homo sapiens germline mRNA sequence | 1.00 | 2.16 |
| 426046 | AA833655 | Hs.206868 | Homo sapiens cDNA FLJ14056 fis, clone HE | 1.59 | 2.73 |
| 451907 | AI822065 | Hs.50749 | ESTs, Moderately similar to ALU7_HUMAN A | 1.74 | 2.65 |
| 418796 | AA228351 | Hs.34060 | ESTs | 1.28 | 2.12 |
| 422431 | AI769410 | Hs.221461 | ESTs | 1.80 | 3.58 |
| 417557 | AA225622 | Hs.293589 | ESTs | 1.32 | 2.14 |
| 455313 | AW894409 | Hs.125472 | ESTs, Moderately similar to KIAA0877 pro | 1.48 | 2.57 |
| 415479 | F10042 | Hs.4840 | ESTs | 1.83 | 2.01 |
| 450433 | AW444538 | Hs.231863 | ESTs | 1.31 | 2.58 |
| 410581 | AA018982 | Hs.125036 | tumor endothelial marker 7 precursor | 1.54 | 1.62 |
| 455407 | AW936813 | | gb: PM2-DT0023-050400-003-b10 DT0023 Homo | 1.32 | 2.15 |
| 417552 | R00916 | Hs.166510 | ESTs | 1.50 | 2.63 |
| 428290 | AI932995 | Hs.183475 | Homo sapiens clone 25061 mRNA sequence | 1.94 | 2.70 |
| 432391 | AI732374 | Hs.339827 | Human DNA sequence from clone RP5-881L22 | 0.96 | 2.38 |
| 456283 | U68162 | Hs.84171 | myeloproliferative leukemia virus oncoge | 1.22 | 2.13 |
| 438535 | L09078 | | gb: Homo sapiens mRNA fragment | 2.14 | 1.95 |
| 416564 | AW795793 | Hs.2575 | Homo sapiens cDNA FLJ12257 fis, clone MA | 2.28 | 1.93 |
| 435200 | AA670310 | Hs.145903 | ESTs | 1.16 | 2.13 |
| 457635 | AV660976 | Hs.3569 | hypothetical protein | 1.37 | 3.10 |
| 444930 | BE185536 | Hs.301183 | molecule possessing ankyrin repeats indu | 0.99 | 2.45 |
| 449319 | AA373630 | Hs.188750 | ESTs | 1.56 | 3.28 |
| 418992 | AW074143 | Hs.87134 | ESTs | 1.88 | 2.20 |
| 409367 | AW382767 | | gb: PM0-HT0339-081199-001-h05 HT0339 Homo | 1.30 | 2.50 |
| 434973 | AW449285 | Hs.313636 | EST | 1.11 | 2.65 |
| 408383 | BE466959 | Hs.144153 | ESTs | 1.30 | 2.44 |
| 440100 | BE382685 | Hs.158549 | ESTs, Weakly similar to T2D3_HUMAN TRANS | 1.23 | 2.71 |
| 431996 | AL122087 | Hs.272304 | Homo sapiens mRNA; cDNA DKFZp564C0371 (f | 1.24 | 2.27 |
| 427681 | AB018263 | Hs.180338 | tumor necrosis factor receptor superfami | 1.70 | 1.68 |
| 405146 | | | C8001690*: gi\|6754446\|ref\|NP_034760.1\|ki | 2.00 | 0.68 |
| 436154 | AA764950 | Hs.119898 | ESTs | 1.43 | 3.00 |
| 451233 | AA047221 | Hs.59752 | ESTs | 1.38 | 2.20 |
| 446856 | AI814373 | Hs.164175 | ESTs | 1.33 | 3.93 |
| 448211 | BE384592 | Hs.6451 | PRO0659 protein | 1.48 | 2.73 |
| 418283 | S79895 | Hs.83942 | cathepsin K (pycnodysostosis) | 1.33 | 2.68 |
| 409609 | AW444670 | Hs.335685 | ESTs | 1.27 | 1.51 |
| 450414 | AI907735 | Hs.21446 | KIAA1716 protein | 1.60 | 1.24 |
| 452929 | AW954938 | Hs.172816 | neuregulin 1 | 2.01 | 3.70 |
| 435112 | AW976145 | Hs.143198 | inhibitor of growth family, member 3 | 1.22 | 1.30 |
| 439806 | AA846824 | Hs.180908 | ESTs | 0.80 | 2.04 |
| 439910 | H66765 | Hs.339397 | ESTs | 1.28 | 2.16 |
| 437886 | BE264111 | Hs.31314 | retinoblastoma-binding protein 7 | 1.06 | 2.82 |
| 441354 | AA931221 | Hs.126813 | ESTs | 1.20 | 2.28 |
| 428951 | AL138153 | Hs.300410 | ESTs, Moderately similar to A47582 B-cel | 1.50 | 1.83 |
| 438272 | AI167963 | Hs.143700 | ESTs, Weakly similar to S65824 reverse t | 1.34 | 2.51 |
| 429642 | X68264 | Hs.211579 | melanoma cell adhesion molecule | 1.18 | 1.18 |
| 422121 | AI767949 | Hs.179833 | ESTs | 1.18 | 2.26 |
| 411184 | AW821117 | | gb: PM2-ST0303-170100-003-g03 ST0303 Homo | 1.18 | 2.21 |
| 435871 | AF257077 | Hs.283627 | eukaryotic translation initiation factor | 1.17 | 1.57 |
| 430570 | AI417881 | Hs.292464 | ESTs | 1.49 | 3.17 |
| 431995 | AL080197 | Hs.272302 | hypothetical protein | 1.52 | 2.11 |
| 451326 | AW296946 | Hs.256078 | ESTs | 1.19 | 2.18 |
| 437046 | BE149154 | | gb: RC2-HT0252-271099-017-c11 HT0252 Homo | 1.18 | 2.25 |
| 410154 | F06959 | | gb: HSC1QD011 normalized infant brain cDN | 1.41 | 2.05 |
| 434373 | AI565566 | Hs.168587 | ESTs | 1.39 | 1.33 |
| 444552 | AW295211 | Hs.230777 | ESTs | 1.36 | 2.20 |
| 411608 | AW853441 | | gb: RC1-CT0252-030100-023-g09 CT0252 Homo | 2.12 | 1.80 |
| 440573 | BE550891 | Hs.270624 | ESTs | 2.19 | 2.17 |
| 443047 | AW157377 | Hs.132910 | ESTs | 1.81 | 2.28 |
| 451473 | AW298047 | Hs.346198 | ESTs | 1.18 | 2.30 |
| 416265 | AA177088 | Hs.190065 | ESTs | 2.37 | 3.38 |
| 435375 | AI733610 | Hs.187832 | ESTs | 1.12 | 2.18 |
| 401469 | | | NM_022137*: Homo sapiens secreted modular | 1.32 | 1.61 |
| 456152 | AA174126 | Hs.332163 | ESTs | 1.26 | 2.50 |
| 415808 | R21439 | Hs.334578 | Homo sapiens, clone IMAGE: 3929520, mRNA | 1.39 | 2.43 |
| 452721 | AJ269529 | Hs.301871 | solute carrier family 37 (glycerol-3-pho | 0.92 | 2.20 |
| 435127 | AI217926 | Hs.179863 | EST | 1.36 | 2.65 |
| 420772 | AW752656 | Hs.222707 | KIAA1718 protein | 1.19 | 1.50 |
| 456332 | AA228357 | | gb: nc39d05.r1 NCI_CGAP_Pr2 Homo sapiens | 1.45 | 3.57 |
| 444678 | AI741513 | Hs.143739 | ESTs | 1.43 | 1.62 |
| 446175 | AL036568 | Hs.291 | glutamyl aminopeptidase (aminopeptidase | 1.00 | 1.53 |
| 416463 | H59241 | | Homo sapiens cDNA FLJ11095 fis, clone PL | 1.44 | 2.13 |
| 405158 | | | ENSP00000243337: CDNA FLJ13984 fis, clone | 1.38 | 2.68 |
| 403903 | | | C5001632*: gi\|10645308\|gb\|AAG21430.1\|AC00 | 1.32 | 1.43 |
| 407271 | X98937 | | gb: H. sapiens rearranged lg heavy chain ( | 1.40 | 2.68 |
| 413929 | BE501689 | Hs.75617 | collagen, type IV, alpha 2 | 1.59 | 1.33 |
| 450778 | U81375 | Hs.25450 | solute carrier family 29 (nucleoside tra | 1.17 | 1.10 |
| 434274 | AA628539 | Hs.116252 | ESTs, Moderately similar to ALU1_HUMAN A | 1.92 | 2.80 |
| 400075 | | | Eos Control | 1.76 | 2.60 |
| 433694 | AI208611 | Hs.12066 | Homo sapiens cDNA FLJ11720 fis, clone HE | 1.48 | 2.33 |
| 454826 | AW833676 | | gb: QV4-TT0008-181199-038-h04 TT0008 Homo | 1.57 | 2.89 |
| 415168 | AA160805 | Hs.199832 | ESTs, Weakly similar to I78885 serine/th | 2.08 | 1.76 |
| 439486 | AF086303 | Hs.103185 | ESTs | 1.49 | 2.19 |
| 403291 | | | Target Exon | 1.36 | 2.28 |
| 438618 | AA897673 | Hs.123457 | ESTs | 0.75 | 0.79 |
| 455087 | AW855389 | | gb: CM3-CT0275-191099-024-e06 CT0275 Homo | 0.91 | 2.63 |
| 408075 | AA382881 | Hs.42409 | CGI-146 protein | 1.46 | 2.15 |
| 436826 | AA731863 | Hs.120276 | ESTs | 1.04 | 3.11 |
| 408961 | AW297475 | Hs.323180 | ESTs | 1.25 | 1.39 |
| 424408 | AI754813 | Hs.146428 | collagen, type V, alpha 1 | 1.64 | 2.05 |
| 423300 | AK000742 | Hs.126774 | L2DTL protein | 1.47 | 3.44 |
| 403217 | AL134878 | | ribosomal protein, large P2 | 1.70 | 2.22 |
| 437990 | AI686579 | Hs.121784 | ESTs | 2.14 | 1.69 |
| 419156 | AC002366 | Hs.46329 | amelogenin (X chromosome, amelogenesis i | 1.40 | 1.45 |
| 411817 | BE302900 | Hs.72241 | mitogen-activated protein kinase kinase | 1.18 | 1.12 |
| 425701 | AA361850 | Hs.322149 | Human clone 137308 mRNA, partial cds | 1.60 | 2.15 |
| 418757 | AI864193 | Hs.169728 | hypothetical protein FLJ13150 | 1.57 | 2.23 |
| 415184 | AA380436 | Hs.211973 | homolog of Yeast RRP4 (ribosomal RNA pro | 1.32 | 2.09 |
| 414918 | AI219207 | Hs.72222 | hypothetical protein FLJ13459 | 1.61 | 1.50 |
| 401723 | | | Target Exon | 1.01 | 2.68 |
| 439010 | AW170332 | Hs.75216 | Homo sapiens cDNA FLJ13713 fis, clone PL | 1.28 | 1.65 |
| 449166 | BE168981 | Hs.23131 | kinesin family member C3 | 1.64 | 2.58 |
| 410642 | AW792784 | | gb: CM0-UM0001-010300-258-h11 UM0001 Homo | 1.54 | 1.90 |
| 409556 | D38616 | Hs.54941 | phosphorylase kinase, alpha 2 (liver) | 1.63 | 1.21 |
| 439894 | AA853077 | Hs.300697 | immunoglobulin heavy constant gamma 3 (G | 0.76 | 0.61 |
| 401913 | | | ENSP00000249158*: CDNA | 0.97 | 2.59 |
| 406097 | | | Target Exon | 1.11 | 1.23 |
| 414745 | AA160511 | Hs.5326 | amino acid system N transporter 2; porcu | 1.29 | 1.12 |
| 445752 | AI733942 | Hs.344887 | ESTs | 2.03 | 1.68 |
| 408052 | AW501117 | Hs.283585 | ESTs | 1.32 | 1.72 |
| 407256 | AA204763 | Hs.288036 | tRNA isopentenylpyrophosphate transferas | 1.01 | 2.09 |
| 423264 | AJ133439 | Hs.126076 | Glutamate receptor interacting protein | 1.51 | 2.39 |
| 418859 | AA229558 | | gb: nc15d10.s1 NCI_CGAP_Pr1 Homo sapiens | 1.40 | 2.35 |
| 410370 | AB037753 | Hs.62767 | KIAA1332 protein | 1.34 | 2.00 |
| 417264 | AA195100 | Hs.188695 | ESTs | 1.09 | 2.61 |
| 444909 | AI933051 | Hs.192280 | ESTs | 1.56 | 2.92 |
| 419386 | AA236867 | | ESTs, Weakly similar to I38022 hypotheti | 1.14 | 2.28 |
| 439212 | AF087995 | Hs.134877 | ESTs | 1.06 | 2.90 |
| 437766 | W69171 | Hs.71741 | ESTs, Highly similar to I38945 melanoma | 1.25 | 2.28 |
| 448951 | AI611221 | Hs.334802 | hypothetical protein FLJ10101 | 1.88 | 2.17 |
| 401659 | | | Target Exon | 1.63 | 2.05 |
| 419145 | N99638 | | gb: za39g11.r1 Soares fetal liver spleen | 2.63 | 3.85 |
| 444813 | AW054834 | Hs.210356 | ESTs | 1.73 | 2.14 |
| 433902 | AW292820 | Hs.144906 | ESTs | 1.88 | 2.46 |
| 403072 | | | NM_003319*: Homo sapiens titin (TTN), mRN | 1.32 | 2.91 |
| 452484 | AB033042 | Hs.29679 | cofactor required for Sp1 transcriptiona | 0.72 | 0.70 |
| 456788 | AA724612 | Hs.133130 | Homo sapiens mRNA; cDNA DKFZp566H0124 (f | 1.90 | 3.40 |
| 403315 | | | Target Exon | 1.22 | 2.00 |
| 406432 | AJ289116 | | CD1E antigen, e polypeptide | 2.31 | 2.63 |
| 457785 | AA682670 | Hs.160884 | ESTs | 0.96 | 2.38 |
| 433259 | AA580665 | Hs.326082 | ESTs | 1.46 | 1.07 |
| 436882 | AW016722 | Hs.194976 | SH2 domain-containing phosphatase anchor | 1.38 | 2.13 |
| 401473 | | | Target Exon | 1.47 | 2.04 |
| 444816 | Z48633 | Hs.283742 | H. sapiens mRNA for retrotransposon | 1.64 | 2.15 |
| 438029 | H61502 | Hs.10235 | chromosome 5 open reading frame 4 | 1.44 | 2.25 |
| 431830 | Y16645 | Hs.271387 | small inducible cytokine subfamily A (Cy | 1.26 | 2.21 |
| 450817 | N71597 | Hs.29698 | ESTs, Weakly similar to ZN91_HUMAN ZINC | 2.20 | 2.90 |
| 404427 | | | C8000068*: gi\|5453579\|ref\|NP_006120.1\| bo | 0.74 | 0.81 |
| 430658 | AW970093 | Hs.24453 | ESTs | 1.45 | 2.55 |
| 405723 | | | Target Exon | 1.60 | 2.28 |
| 436896 | AW977385 | Hs.278615 | ESTs | 1.17 | 1.64 |
| 411974 | AW880414 | Hs.84264 | acidic protein rich in leucines | 1.54 | 2.08 |
| 412528 | AI123478 | Hs.32112 | ESTs | 1.72 | 2.85 |
| 446425 | AW295364 | Hs.255418 | ESTs | 1.25 | 1.31 |
| 424991 | AA775471 | Hs.241467 | ESTs | 0.62 | 0.37 |
| 443100 | AI033188 | | gb: ow94e08.s1 Soares_fetal_liver_spleen_{—} | 1.15 | 2.34 |
| 445332 | AI220225 | Hs.321057 | ESTs | 1.07 | 2.00 |
| 414781 | D50917 | Hs.77293 | KIAA0127 gene product | 1.04 | 3.43 |
| 421893 | NM_001078 | Hs.109225 | vascular cell adhesion molecule 1 | 1.15 | 2.53 |
| 424265 | AF173901 | Hs.144287 | hairy/enhancer-of-split related with YRP | 1.26 | 2.00 |
| 446667 | BE161878 | Hs.224805 | ESTs | 1.12 | 2.13 |
| 426399 | AA652588 | Hs.301348 | Homo sapiens cDNA FLJ13271 fis, clone OV | 2.26 | 1.29 |
| 438190 | AA780020 | Hs.136798 | ESTs, Moderately similar to KBF3_HUMAN N | 1.44 | 2.07 |
| 406972 | M32053 | | gb: Human H19 RNA gene, complete cds. | 1.38 | 2.11 |
| 417086 | AA194446 | | ESTs, Weakly similar to S55024 nebulin, | 2.12 | 3.30 |
| 446410 | AI361109 | Hs.151721 | ESTs, Weakly similar to I38022 hypotheti | 1.14 | 2.33 |
| 427674 | NM_003528 | Hs.2178 | H2B histone family, member Q | 1.24 | 1.00 |
| 422526 | AA311763 | Hs.131056 | ESTs | 1.29 | 2.04 |
| 439317 | AF086127 | Hs.50600 | ESTs, Weakly similar to T47156 hypotheti | 1.26 | 2.12 |
| 409126 | AA063426 | | gb: zf70c08.s1 Soares_pineal_gland_N3HPG | 1.28 | 2.20 |
| 412093 | BE242691 | Hs.14947 | ESTs | 0.87 | 2.58 |
| 420169 | AA256126 | Hs.16179 | hypothetical protein FLJ23467 | 1.38 | 2.07 |
| 426096 | D87436 | Hs.166318 | lipin 2 | 2.00 | 2.25 |
| 402551 | | | NM_005012*: Homo sapiens receptor tyrosin | 0.80 | 0.82 |
| 405760 | | | Target Exon | 1.44 | 2.85 |
| 402901 | | | NM_025206*: Homo sapiens hypothetical pro | 1.63 | 1.27 |
| 453982 | AW014252 | Hs.252837 | ESTs | 1.44 | 2.03 |
| 424244 | AV647184 | Hs.143601 | hypothetical protein hCLA-iso | 1.40 | 1.18 |
| 439984 | BE559514 | Hs.275425 | hypothetical protein | 1.30 | 2.15 |
| 457297 | AW968188 | | gb: EST380383 MAGE resequences, MAGJ Homo | 1.64 | 3.17 |
| 415054 | AI733907 | | gb: zo86h09.y5 Stratagene ovarian cancer | 1.00 | 2.20 |
| 426273 | AI174861 | Hs.190623 | ESTs | 1.19 | 1.16 |
| 405187 | | | NM_014272: Homo sapiens a disintegrin-lik | 1.31 | 1.35 |
| 413939 | AL047051 | Hs.199961 | ESTs, Weakly similar to ALU7_HUMAN ALU S | 2.44 | 1.88 |
| 427596 | AA449506 | Hs.270143 | extracellular glycoprotein EMILIN-2 prec | 2.06 | 1.50 |
| 408049 | AW076098 | Hs.345588 | desmoplakin (DPI, DPII) | 2.01 | 3.90 |
| 406002 | | | Target Exon | 1.73 | 2.08 |
| 408284 | AW248254 | Hs.44101 | protein kinase PKNbeta | 1.28 | 1.31 |
| 431377 | AW178807 | Hs.246182 | ESTs | 1.40 | 2.70 |
| 451456 | AW386183 | Hs.210305 | ESTs | 1.44 | 2.08 |
| 427530 | AA405093 | Hs.126519 | ESTs | 1.07 | 1.12 |
| 431957 | AK002104 | Hs.272246 | hypothetical protein FLJ11292 | 1.27 | 2.89 |
| 422283 | AW411307 | Hs.114311 | CDC45 (cell division cycle 45, S. cerevis | 1.74 | 1.28 |
| 419600 | AA448958 | Hs.91481 | NEU1 protein | 1.13 | 1.15 |
| 423314 | AI400661 | Hs.127811 | disintegrin metalloproteinase with throm | 1.44 | 2.53 |
| 451690 | AW451469 | Hs.209990 | ESTs | 1.41 | 2.49 |
| 454662 | AW812715 | | gb: RC4-ST018-271099-011-g01 ST0185 Homo | 1.35 | 2.86 |
| 454413 | AI653672 | Hs.40092 | PNAS-123 | 1.79 | 2.03 |
| 416861 | AW977206 | Hs.151858 | ESTs | 1.52 | 2.10 |
| 415908 | H08623 | Hs.22833 | ESTs | 1.37 | 2.13 |
| 438942 | AW875398 | Hs.6451 | PRO0659 protein | 1.80 | 1.55 |
| 407618 | AW054922 | Hs.53478 | Homo sapiens cDNA FLJ12366 fis, clone MA | 2.16 | 3.18 |
| 429177 | AA447527 | Hs.207429 | ESTs | 1.74 | 3.19 |
| 448357 | N20169 | Hs.108923 | RAB38, member RAS oncogene family | 0.77 | 0.73 |
| 422008 | AJ000534 | Hs.110708 | sarcoglycan, epsilon | 1.52 | 4.08 |
| 434461 | AA744046 | Hs.133350 | ESTs, Weakly similar to I78885 serine/th | 1.66 | 2.16 |
| 413489 | BE144228 | | gb: MR0-HT0165-140200-009-d04 HT0165 Homo | 1.28 | 2.23 |
| 405551 | | | Target Exon | 1.11 | 1.19 |
| 441183 | BE562910 | Hs.92679 | Homo sapiens clone CDABP0014 mRNA sequen | 1.20 | 1.20 |
| 456034 | AW450979 | | gb: UI-H-BI3-ala-a-12-0-UI.s1 NCI_CGAP_Su | 1.98 | 2.53 |
| 420611 | AA994635 | Hs.129929 | ESTs | 1.46 | 2.15 |
| 422061 | BE178434 | Hs.267995 | ESTs, Moderately similar to G02654 ribos | 1.42 | 2.30 |
| 437908 | AI082424 | | ESTs | 1.38 | 2.21 |
| 423052 | M28214 | Hs.123072 | RAB3B, member RAS oncogene family | 0.74 | 0.43 |
| 401927 | | | C17000914*: gi\|8394367\|ref\|NP_058549.1\| s | 2.26 | 2.14 |
| 432967 | AA572949 | Hs.207566 | ESTs | 1.52 | 2.28 |
| 439159 | AF087972 | Hs.120938 | ESTs | 2.03 | 2.08 |
| 415357 | H22757 | Hs.13471 | ESTs | 1.82 | 2.07 |
| 442327 | AA991745 | Hs.42522 | ESTs | 1.48 | 2.88 |
| 430186 | AB020696 | Hs.234791 | KIAA0889 protein | 1.46 | 2.23 |
| 426971 | AI809984 | Hs.243209 | ESTs, Weakly similar to NPA1_HUMAN NEURO | 1.06 | 2.13 |
| 422687 | AW068823 | Hs.119206 | insulin-like growth factor binding prote | 1.61 | 1.37 |
| 432954 | AI076345 | Hs.214199 | ESTs | 1.19 | 2.84 |
| 429040 | AL035542 | Hs.248169 | olfactory receptor, family 2, subfamily | 1.25 | 1.44 |
| 414169 | AA136169 | Hs.149335 | ESTs | 1.59 | 2.51 |
| 419882 | AA687313 | Hs.190043 | ESTs | 1.20 | 2.50 |
| 426900 | AW163564 | Hs.142375 | ESTs | 1.87 | 1.77 |
| 418773 | T39748 | Hs.325474 | Target CAT | 1.35 | 2.02 |
| 439776 | AL360140 | Hs.176005 | Homo sapiens mRNA full length insert cDN | 1.32 | 2.10 |
| 428712 | AW085131 | Hs.190452 | KIAA0365 gene product | 1.41 | 1.52 |
| 408839 | AW277084 | | gb: xp61h09.x1 NCI_CGAP_Ov39 Homo sapiens | 1.14 | 2.03 |
| 450492 | AW290961 | Hs.201815 | ESTs | 1.17 | 2.21 |
| 434654 | AI825942 | Hs.139366 | Homo sapiens clone L5 polyadenylated HER | 1.62 | 2.31 |
| 457567 | AW939074 | | gb: QV1-DT0069-010200-057-c12 DT0069 Homo | 1.80 | 3.73 |
| 452426 | AI904823 | Hs.31297 | duodenal cytochrome b | 2.15 | 1.84 |
| 418559 | AA225048 | Hs.104207 | ESTs | 1.84 | 2.33 |
| 439099 | AB037800 | Hs.6462 | protein kinase C and casein kinase subst | 1.07 | 1.15 |
| 451984 | R60571 | Hs.27406 | Homo sapiens mRNA; cDNA DKFZp566F1946 (f | 1.18 | 1.22 |
| 420789 | AI670057 | Hs.199882 | ESTs | 2.24 | 2.55 |
| 456396 | AA236863 | Hs.188894 | ESTs, Weakly similar to APXL_HUMAN APICA | 1.07 | 1.14 |
| 402948 | | | NM_025206: Homo sapiens hypothetical prot | 2.41 | 1.83 |
| 426405 | AW296631 | Hs.283403 | ESTs | 1.28 | 1.07 |
| 439732 | AW629604 | Hs.167641 | hypothetical protein from EUROIMAGE 1703 | 0.85 | 0.77 |
| 416784 | AA334592 | Hs.79914 | lumican | 1.88 | 1.27 |
| 422531 | AW967280 | Hs.293894 | ESTs, Weakly similar to HERC2 [H. sapiens | 1.20 | 1.25 |
| 415608 | F12795 | Hs.12286 | ESTs, Moderately similar to ALU1_HUMAN A | 1.03 | 2.31 |
| 428671 | BE297851 | Hs.189482 | zinc finger protein 179 | 1.26 | 2.20 |
| 420007 | H13700 | Hs.31235 | ESTs, Weakly similar to Y934_HUMAN HYPOT | 1.60 | 2.25 |
| 400850 | | | Target Exon | 1.22 | 1.03 |
| 404580 | | | trichorhinophalangeal syndrome I gene (T | 1.00 | 1.00 |
| 407680 | AW064284 | Hs.279153 | ESTs | 1.02 | 2.28 |
| 410420 | AA224053 | Hs.172405 | cell division cycle 27 | 1.64 | 1.00 |
| 421234 | AA907153 | Hs.190060 | ESTs | 1.76 | 1.45 |
| 426791 | AA384910 | Hs.46519 | ESTs | 1.12 | 2.15 |
| 430439 | AL133561 | | DKFZP434B061 protein | 1.00 | 1.00 |
| 434036 | AI659131 | Hs.197733 | hypothetical protein MGC2849 | 1.00 | 1.00 |
| 438915 | AA280174 | Hs.285681 | Williams-Beuren syndrome chromosome regi | 1.40 | 1.00 |
| 440304 | BE159984 | Hs.125395 | ESTs | 1.00 | 1.00 |
| 441699 | AW511126 | Hs.127572 | ESTs | 1.00 | 1.73 |
| 443383 | AI792453 | Hs.166507 | ESTs | 2.04 | 1.00 |
| 445660 | AI702668 | Hs.201955 | ESTs | 1.00 | 1.00 |
| 453160 | AI263307 | Hs.239884 | H2B histone family, member L | 1.00 | 1.00 |
| 456513 | AA279143 | Hs.88561 | ESTs | 1.00 | 1.40 |
| 457231 | AI472022 | Hs.301959 | proline synthetase co-transcribed (bacte | 0.98 | 0.63 |
| 459565 | W27086 | Hs.209694 | ESTs | 1.00 | 1.00 |
| 429317 | AA831552 | Hs.268016 | Homo sapiens cDNA: FLJ21243 fis, clone C | 1.00 | 1.00 |
| 430971 | M26150 | Hs.248177 | H3 histone family, member L | 1.14 | 1.40 |
| 408376 | AW971303 | Hs.292601 | ESTs | 1.08 | 1.60 |
| 411920 | AW876263 | | gb: PM4-PT0019-131299-006-E09 PT0019 Homo | 0.82 | 0.45 |
| 457389 | AW970989 | | gb: EST383074 MAGE resequences, MAGK Homo | 0.92 | 0.71 |
| 408565 | BE502544 | Hs.282244 | ESTs, Weakly similar to peptidoglycan re | 1.00 | 2.10 |
| 438086 | AA336519 | Hs.83623 | nuclear receptor subfamily 1, group I, m | 1.00 | 1.00 |
| 446779 | AI341135 | Hs.156084 | ESTs | 1.06 | 2.02 |
| 441691 | AI015418 | Hs.127556 | ESTs | 1.13 | 2.03 |
| 402039 | | | Target Exon | 0.44 | 0.36 |
| 437133 | AB018319 | Hs.5460 | KIAA0776 protein | 0.95 | 0.63 |
| 438089 | W05391 | | nuclear receptor subfamily 1, group I, m | 3.12 | 1.00 |
| 409582 | R27430 | Hs.271565 | ESTs | 1.00 | 1.00 |
| 428769 | AW207175 | Hs.106771 | ESTs | 1.00 | 1.48 |
| 442868 | AI022701 | Hs.336984 | ESTs | 1.27 | 1.62 |
| 439559 | AW364675 | Hs.173921 | ESTs, Weakly similar to 2109260A B cell | 1.00 | 1.33 |
| 426958 | R18845 | Hs.172979 | zinc finger protein 177 | 1.24 | 2.25 |
| 419015 | T79262 | Hs.14463 | ESTs | 1.16 | 2.03 |
| 415806 | AA169560 | | gb: zo89d08. r1 Stratagene ovarian cancer | 1.00 | 1.33 |
| 436110 | AA704899 | Hs.291651 | ESTs, Weakly similar to I38022 hypotheti | 1.60 | 2.21 |
| 458760 | AI498631 | Hs.111334 | ferritin, light polypeptide | 1.10 | 1.43 |
| 447342 | AI199268 | Hs.19322 | Homo sapiens, Similar to RIKEN cDNA 2010 | 1.28 | 1.00 |
| 438182 | AW342140 | Hs.182545 | ESTs, Weakly similar to ALU1_HUMAN ALU S | 0.90 | 2.31 |
| 438091 | AW373062 | | nuclear receptor subfamily 1, group I, m | 4.70 | 1.00 |
| 441633 | AW958544 | Hs.112242 | normal mucosa of esophagus specific 1 | 2.48 | 1.00 |
| 432222 | AI204995 | | gb: an03c03.x1 Stratagene schizo brain S1 | 1.96 | 2.84 |
| 416055 | Z45423 | Hs.13349 | Homo sapiens cDNA FLJ14647 fis, clone NT | 1.52 | 1.46 |
| 417895 | AA836392 | Hs.56237 | hypothetical protein FLJ20495 | 1.05 | 1.18 |
| 422959 | AV647015 | | paired immunoglobulin-like receptor beta | 1.33 | 1.25 |
| 408969 | AW297929 | Hs.328317 | EST | 1.88 | 2.07 |
| 409536 | H59024 | Hs.14485 | Homo sapiens cDNA: FLJ23220 fis, clone A | 1.18 | 2.38 |
| 447449 | AW137091 | Hs.18624 | KIAA1052 protein | 1.07 | 1.13 |
| 437315 | AW976247 | Hs.153248 | ESTs | 1.16 | 2.53 |
| 459317 | BRCA1b | | Eos Control | 1.36 | 1.32 |
| 405137 | | | Target Exon | 1.11 | 1.18 |
| 400366 | M22333 | | Target | 1.55 | 1.42 |
| 423413 | AA325560 | Hs.346401 | ESTs | 1.78 | 1.57 |
| 433972 | AI878910 | Hs.278670 | cisplatin resistance-associated overexpr | 1.62 | 2.98 |
| 440748 | AW451780 | Hs.130363 | ESTs | 1.42 | 2.14 |
| 422637 | AA399024 | Hs.118836 | myoglobin | 1.46 | 2.38 |
| 432342 | AL036128 | Hs.274404 | plasminogen activator, tissue | 1.67 | 1.10 |
| 442820 | AW293459 | Hs.172681 | ESTs | 1.02 | 1.13 |
| 436573 | AA723297 | Hs.127138 | ESTs | 1.18 | 1.15 |
| 403779 | | | Target Exon | 1.13 | 1.15 |
| 447686 | AI939440 | Hs.345192 | ESTs | 1.66 | 2.78 |
| 447506 | R78778 | Hs.29808 | Homo sapiens cDNA: FLJ21122 fis, clone C | 1.44 | 2.48 |
| 425853 | BE348404 | Hs.24740 | ESTs | 1.40 | 2.75 |
| 454457 | AW753456 | | gb: QV2-CT0261-261099-011-d11 CT0261 Homo | 1.52 | 2.00 |
| 424132 | AA335715 | Hs.200299 | ESTs | 1.34 | 1.32 |
| 421707 | NM_014921 | Hs.107054 | lectomedin-2 | 1.09 | 1.14 |
| 442871 | AI290691 | Hs.131393 | ESTs | 1.40 | 2.50 |
| 448489 | AI523875 | | gb: tg97d04.x1 NCI_CGAP_CLL1 Homo sapiens | 1.31 | 2.20 |
| 436365 | AW444548 | Hs.163118 | ESTs | 1.07 | 1.12 |
| 415733 | AI052628 | Hs.271570 | ESTs, Weakly similar to 2109260A B cell | 1.91 | 2.01 |
| 413888 | AA580288 | | gb: nn12d01.s1 NCI_CGAP_Co12 Homo sapiens | 1.75 | 1.93 |
| 408063 | BE086548 | Hs.42346 | calcineurin-binding protein calsarcin-1 | 1.92 | 1.73 |
| 442959 | AI025248 | Hs.6927 | ESTs | 1.05 | 1.12 |
| 409610 | AW444736 | Hs.27864 | ESTs | 1.62 | 2.45 |
| 424793 | AI559696 | Hs.298885 | ESTs | 1.37 | 2.78 |
| 449977 | C16939 | Hs.297848 | ESTs | 1.52 | 4.57 |
| 414051 | BE244127 | | gb: TCBAP1E0661 Pediatric pre-B cell acut | 1.68 | 2.84 |
| 422400 | AA974434 | Hs.128353 | ESTs | 1.04 | 2.20 |
| 443908 | AW295791 | Hs.13040 | G protein-coupled receptor 86 | 1.47 | 2.10 |
| 439316 | AF086126 | Hs.118208 | Homo sapiens cDNA FLJ11727 fis, clone HE | 2.08 | 0.59 |
| 438505 | AA808948 | Hs.173776 | ESTs, Moderately similar to ALU1_HUMAN A | 1.44 | 2.73 |
| 436196 | AK001084 | Hs.333498 | Homo sapiens cDNA FLJ10222 fis, clone HE | 2.17 | 1.00 |
| 453740 | AL120295 | Hs.311809 | ESTs, Moderately similar to PC4259 ferri | 1.88 | 2.58 |
| 431756 | R69465 | Hs.255889 | ESTs | 1.12 | 1.30 |
| 424487 | T08754 | Hs.6259 | KIAA1698 protein | 1.15 | 1.15 |
| 435392 | R07195 | Hs.19918 | ESTs | 1.38 | 2.64 |
| 430068 | AA464964 | | gb: zx80f10.s1 Soares ovary tumor NbHOT H | 0.92 | 2.12 |
| 418741 | H83265 | Hs.8881 | ESTs, Weakly similar to S41044 chromosom | 1.44 | 2.51 |
| 411664 | BE065069 | Hs.270833 | amphiregulin (schwannoma-derived growth | 1.94 | 2.33 |
| 416586 | D44643 | Hs.14144 | secreted modular calcium-binding protein | 1.72 | 2.68 |
| 419612 | AI498267 | Hs.110613 | KIAA0421 protein | 2.28 | 2.46 |
| 435800 | AI248285 | Hs.118348 | ESTs | 1.42 | 2.45 |
| 433363 | AA584829 | Hs.275163 | non-metastatic cells 2, protein (NM23B) | 2.07 | 2.53 |
| 422936 | AA319278 | | gb: EST21478 Adrenal gland tumor Homo sap | 1.46 | 1.22 |
| 413358 | BE259160 | Hs.75313 | aldo-keto reductase family 1, member B1 | 1.43 | 1.43 |
| 435357 | N71620 | Hs.118173 | ESTs | 1.44 | 2.93 |
| 441063 | AA913819 | Hs.188025 | ESTs | 1.20 | 2.80 |
| 450724 | R55428 | | gb: yj79b05.r1 Soares breast 2NbHBst Homo | 1.44 | 4.18 |
| 430446 | AF131782 | Hs.241438 | Homo sapiens clone 24941 mRNA sequence | 1.03 | 2.34 |
| 401577 | | | NM_000761: Homo sapiens cytochrome P450, | 1.13 | 1.22 |
| 403978 | | | C5000010*: gi\|10440464\|dbj\|BAB15765.1\| (A | 1.22 | 1.66 |
| 459702 | AI204995 | | gb: an03c03.x1 Stratagene schizo brain S1 | 2.72 | 4.60 |
| 416708 | H78836 | Hs.181900 | ESTs, Moderately similar to ALU1_HUMAN A | 1.36 | 2.03 |
| 451410 | AL110235 | Hs.26358 | DKFZP566K1924 protein | 1.51 | 2.28 |
| 451159 | AW298631 | Hs.27721 | Wolf-Hirschhorn syndrome candidate 1-lik | 1.33 | 1.09 |
| 448455 | AI252625 | Hs.269860 | ESTs, Moderately similar to S65657 alpha | 0.83 | 0.40 |
| 444020 | R92962 | Hs.35052 | ESTs | 1.66 | 2.50 |
| 414623 | BE391050 | | gb: 601285674F1 NIH_MGC_44 Homo sapiens c | 1.84 | 3.88 |
| 454915 | AW841619 | | gb: RC1-CN0017-120200-012-b09 CN0017 Homo | 1.14 | 2.10 |
| 444064 | W85970 | Hs.16292 | ESTs | 0.80 | 0.63 |
| 454353 | AW389693 | Hs.300700 | hypothetical protein FLJ20727 | 1.30 | 2.10 |
| 447794 | AI424999 | Hs.161445 | EST | 1.26 | 2.05 |
| 426686 | AI362802 | Hs.171814 | parathymosin | 1.16 | 1.11 |
| 435815 | AA700482 | Hs.113157 | ESTs | 1.66 | 2.73 |
| 432482 | L19267 | Hs.275924 | dystrophia myotonica-containing WD repea | 1.10 | 1.15 |
| 431062 | AA491270 | Hs.187946 | ESTs | 1.44 | 2.60 |
| 429191 | AF065215 | Hs.198161 | phospholipase A2, group IVB (cytosolic) | 1.35 | 1.06 |
| 424456 | AA341017 | Hs.25549 | hypothetical protein FLJ20898 | 1.21 | 3.45 |
| 451124 | AI186203 | Hs.31432 | cardiac ankyrin repeat protein | 1.23 | 2.10 |
| 432828 | AB042326 | Hs.287402 | chondroitin 4-sulfotransferase | 1.11 | 2.71 |
| 431868 | BE246400 | Hs.285176 | acetyl-Coenzyme A transporter | 1.03 | 3.10 |
| 429321 | AA449921 | | gb: zx37g07.r1 Soares _total_fetus_Nb2HF8_{—} | 1.68 | 2.93 |
| 417890 | R79048 | | gb: yi87g02.r1 Soares placenta Nb2HP Homo | 1.32 | 1.80 |
| 439590 | AF086410 | | gb: Homo sapiens full length insert cDNA | 1.32 | 2.43 |
| 420232 | AW450051 | Hs.256295 | ESTs | 1.28 | 2.26 |
| 418927 | BE349635 | Hs.190284 | ESTs | 1.46 | 1.23 |
| 441940 | AW298115 | Hs.128152 | ESTs | 1.34 | 1.34 |
| 401090 | | | C9000193*: gi\|6330729\|dbj\|BAA86547.1\| (AB | 1.50 | 1.40 |
| 409136 | AW206670 | Hs.50748 | chromosome 21 open reading frame 18 | 1.02 | 2.38 |
| 438267 | AW205708 | Hs.292725 | ESTs, Weakly similar to T18818 hypotheti | 1.28 | 2.25 |
| 422482 | AI439905 | Hs.344476 | gb: ti57g08.x1 NCI_CGAP_Lym12 Homo sapien | 1.05 | 2.81 |
| 420067 | T52431 | Hs.94795 | Homo sapiens mRNA; cDNA DKFZp564O222 (fr | 1.77 | 2.40 |
| 442180 | AA983913 | Hs.128929 | ESTs | 1.76 | 2.38 |
| 434256 | AI378817 | Hs.191847 | ESTs | 1.05 | 2.06 |
| 444519 | AI160304 | Hs.28313 | ESTs | 0.55 | 0.63 |
| 454459 | AW855738 | Hs.17767 | KIAA1554 protein | 1.10 | 2.05 |
| 455988 | BE177983 | | gb: RC3-HT0600-230300-021-g10 HT0600 Homo | 1.70 | 2.64 |
| 444510 | AI367823 | Hs.146872 | ESTs | 1.44 | 2.08 |
| 456210 | N49729 | Hs.156875 | ESTs | 1.64 | 2.65 |
| 450569 | AW192334 | Hs.38218 | ESTs | 1.78 | 2.71 |
| 414921 | BE390551 | Hs.77628 | steroidogenic acute regulatory protein r | 1.05 | 1.12 |
| 401381 | | | C14000165: gi\|12698069\|dbj\|BAB21853.1\| (A | 0.63 | 0.85 |
| 439998 | BE559554 | Hs.61790 | hypothetical protein FLJ23338 | 1.06 | 1.14 |
| 453762 | AW977286 | Hs.17428 | RBP1-like protein | 1.42 | 2.68 |
| 419403 | AA744520 | Hs.87734 | ESTs, Weakly similar to nonsyndromic hea | 0.99 | 2.17 |
| 423736 | AW936874 | | gb: RC1-DT0029-120100-011-f07 DT0029 Homo | 2.05 | 1.56 |
| 421186 | AI798039 | Hs.270563 | ESTs, Moderately similar to T12512 hypot | 1.29 | 1.31 |
| 426435 | AI827946 | Hs.124854 | hypothetical brain protein my040 | 1.36 | 1.59 |
| 439312 | AA833902 | Hs.270745 | ESTs | 1.60 | 2.50 |
| 407924 | BE537128 | Hs.299797 | ESTs | 1.51 | 1.15 |
| 409692 | AI500724 | | KIAA1550 protein | 1.72 | 2.21 |
| 415449 | H15034 | | gb: ym20a03.s1 Soares infant brain 1NIB H | 1.50 | 2.13 |
| 423436 | R21176 | Hs.100926 | ESTs | 1.18 | 2.60 |
| 458697 | AI797713 | Hs.156471 | ESTs | 1.54 | 2.20 |
| 415770 | M79237 | | gb: EST01385 Subtracted Hippocampus, Stra | 1.49 | 1.55 |
| 449279 | AI962312 | Hs.224976 | ESTs, Weakly similar to CRX_HUMAN CONE-R | 2.50 | 3.60 |
| 429735 | AA458759 | Hs.188794 | ESTs | 1.84 | 2.31 |
| 442124 | R66412 | Hs.129013 | Homo sapiens cDNA FLJ14309 fis, clone PL | 1.10 | 1.19 |
| 412557 | AA761612 | Hs.291557 | ESTs | 1.10 | 1.18 |
| 409335 | NM_001502 | Hs.53985 | glycoprotein 2 (zymogen granule membrane | 1.18 | 1.12 |
| 430526 | AF181862 | Hs.242407 | G protein-coupled receptor, family C, gr | 1.35 | 2.39 |
| 420855 | AA281092 | Hs.33417 | Homo sapiens cDNA: FLJ22806 fis, clone K | 1.22 | 2.09 |
| 450567 | AA033904 | Hs.269235 | ESTs | 1.60 | 2.20 |
| 414197 | W44877 | Hs.55501 | ESTs | 1.06 | 2.08 |
| 448800 | AI571294 | Hs.298889 | ESTs, Moderately similar to ALU1_HUMAN A | 1.65 | 2.79 |
| 421338 | AA287443 | | gb: zs52c10.r1 NCI_CGAP_GCB1 Homo sapiens | 1.47 | 2.90 |
| 412679 | BE144762 | | gb: CM0-HT0180-041099-065-b04 HT0180 Homo | 1.32 | 2.53 |
| 417882 | R22311 | | gb: yh26c09.r1 Soares placenta Nb2HP Homo | 1.58 | 2.43 |
| 425112 | AW953291 | Hs.64211 | hypothetical protein MGC5601 | 0.70 | 0.63 |
| 401658 | | | C16000210: gi\|12585542\|sp\|O14771\|Z213_HUM | 1.68 | 2.04 |
| 409325 | AW377549 | Hs.17865 | ESTs | 1.68 | 2.21 |
| 437402 | AI553976 | Hs.121191 | ESTs | 1.20 | 2.35 |
| 433455 | AA360439 | Hs.89319 | ESTs | 0.98 | 2.53 |
| 457329 | AI634860 | Hs.247043 | type 1 tumor necrosis factor receptor sh | 0.59 | 0.43 |
| 434830 | AW852235 | | gb: QV0-CT0225-230300-169-e11 CT0225 Homo | 1.24 | 1.12 |
| 450696 | AI654223 | Hs.16026 | hypothetical protein FLJ23191 | 1.44 | 2.53 |
| 446098 | AW072215 | Hs.208470 | ESTs | 1.38 | 2.93 |
| 443310 | BE552018 | Hs.133152 | ESTs | 0.85 | 0.83 |
| 424015 | N95696 | Hs.166361 | Homo sapiens mRNA; cDNA DKFZp564F112 (fr | 1.42 | 2.25 |
| 420229 | AA256675 | Hs.194058 | ESTs, Weakly similar to AF252293 1 PAR3 | 1.70 | 2.39 |
| 403371 | | | Target Exon | 1.50 | 3.43 |
| 410744 | H86002 | | gb: ys92b01.r1 Soares retina N2b5HR Homo | 1.32 | 2.13 |
| 424160 | T74062 | | gb: yc81f01.r1 Soares infant brain 1NIB H | 1.30 | 2.17 |
| 438818 | AW979008 | Hs.222487 | ESTs | 1.98 | 2.43 |
| 438791 | AA825750 | Hs.129983 | ESTs | 1.12 | 2.15 |
| 411206 | AW827390 | Hs.16899 | ESTs | 1.17 | 2.58 |
| 432211 | BE274530 | Hs.273333 | hypothetical protein FLJ10986 | 0.42 | 0.30 |
| 448918 | AB011152 | Hs.22572 | KIAA0580 protein | 1.54 | 2.63 |
| 424496 | AI733451 | Hs.167165 | hypothetical protein FLJ12975 | 1.39 | 2.25 |
| 410730 | AW368860 | | DnaJ (Hsp40) homolog, subfamily B, membe | 1.84 | 3.23 |
| 457581 | AA578512 | | gb: nh22e11.s1 NCI_CGAP_Pr1 Homo sapiens | 1.21 | 1.09 |
| 435353 | AW243062 | Hs.190348 | ESTs | 1.90 | 2.98 |
| 417029 | AW952192 | Hs.273385 | guanine nucleotide binding protein (G pr | 1.21 | 1.24 |
| 433682 | AA642418 | Hs.17381 | ESTs | 1.18 | 2.23 |
| 424915 | R42755 | Hs.23096 | ESTs | 1.60 | 2.73 |
| 442201 | AW516704 | Hs.208726 | ESTs | 1.74 | 3.20 |
| 429111 | AI870811 | Hs.7579 | KIAA1151 protein | 1.27 | 1.40 |
| 429282 | N27596 | Hs.21342 | ESTs | 1.84 | 3.73 |
| 436604 | AW105129 | Hs.242158 | ESTs | 1.27 | 2.70 |
| 448712 | W01046 | Hs.333371 | Homo sapiens clone TA40 untranslated mRN | 0.79 | 2.70 |
| 412274 | AA101443 | | gb: zn74a07.r1 Stratagene NT2 neuronal pr | 1.40 | 2.53 |
| 403859 | | | C5001408*: gi\|12621134\|ref\|NP_075244.1\|M | 1.76 | 2.00 |
| 451521 | AA018237 | Hs.128189 | gb: ze53a02.r1 Soares retina N2b4HR Homo | 1.48 | 2.51 |
| 443210 | AI692649 | Hs.9451 | hypothetical protein MGC13168 | 1.44 | 2.60 |
| 442722 | AL048889 | Hs.131029 | ESTs, Weakly similar to B28096 line-1 pr | 1.20 | 2.25 |
| 400840 | | | Target Exon | 0.66 | 0.60 |
| 454639 | AW811633 | | gb: RC2-ST0158-091099-011-d05 ST0158 Homo | 1.23 | 1.41 |
| 439864 | AI720078 | Hs.291997 | ESTs, Weakly similar to A47582 B-cell gr | 1.77 | 2.12 |
| 410725 | AW799279 | | gb: RC0-UM0051-210300-012-h06 UM0051 Homo | 1.08 | 2.55 |
| 423430 | AF112481 | Hs.128501 | RAD54, S. cerevisiae, homolog of, B | 1.94 | 2.29 |
| 450717 | T94709 | | gb: ye35d09.r1 Stratagene lung (937210) H | 1.56 | 2.64 |
| 400314 | NM_018949 | Hs.192720 | G protein-coupled receptor 14 | 0.89 | 0.87 |
| 434947 | AA654320 | Hs.183819 | Homo sapiens cDNA FLJ12304 fis, clone MA | 1.19 | 2.14 |
| 453582 | AW854339 | Hs.33476 | hypothetical protein FLJ11937 | 1.24 | 2.19 |
| 409005 | AW299806 | Hs.297256 | ESTs | 1.24 | 2.03 |
| 406584 | | | Target Exon | 1.52 | 2.37 |
| 420203 | AA256374 | Hs.191069 | ESTs | 1.16 | 1.37 |
| 406156 | | | Target Exon | 1.18 | 1.17 |
| 422132 | AB002337 | Hs.112078 | KIAA0339 gene product | 1.08 | 1.16 |
| 441371 | AW452292 | Hs.197354 | ESTs | 1.19 | 2.00 |
| 434807 | AA364183 | Hs.323443 | hypothetical protein FLJ11806 | 1.30 | 2.76 |
| 424542 | AI860558 | Hs.272009 | ESTs, Weakly similar to ALU2_HUMAN ALU S | 1.48 | 2.48 |
| 450893 | AK002185 | Hs.25625 | hypothetical protein FLJ11323 | 1.15 | 1.57 |
| 418481 | M81945 | Hs.85289 | CD34 antigen | 2.16 | 1.76 |
| 443077 | AI459490 | Hs.60090 | Homo sapiens cDNA FLJ13595 fis, clone PL | 1.36 | 2.41 |
| 437521 | AA758756 | Hs.121380 | ESTs | 1.07 | 2.05 |
| 430265 | L36033 | Hs.237356 | stromal cell-derived factor 1 | 2.34 | 1.35 |
| 446898 | AV660906 | Hs.184411 | albumin | 1.52 | 1.33 |
| 429725 | AA457367 | Hs.191638 | ESTs | 1.38 | 3.00 |
| 425114 | AW409763 | Hs.50699 | ESTs, Weakly similar to 2109260A B cell | 1.13 | 2.34 |
| 419879 | Z17805 | Hs.93564 | Homer, neuronal immediate early gene, 2 | 1.62 | 1.71 |
| 435284 | AA879470 | Hs.96849 | Homo sapiens cDNA FLJ11492 fis, clone HE | 1.20 | 2.50 |
| 415634 | F13165 | Hs.12549 | ESTs, Weakly similar to 2109260A B cell | 1.46 | 2.35 |
| 420565 | AI806770 | Hs.30258 | ESTs | 1.39 | 3.85 |
| 419494 | W01060 | Hs.34382 | ESTs | 1.10 | 1.75 |
| 458183 | AL031591 | Hs.7370 | phosphotidylinositol transfer protein, b | 1.28 | 2.24 |
| 416620 | R93080 | Hs.35035 | ESTs | 1.81 | 2.58 |
| 431356 | AW499632 | Hs.288512 | Homo sapiens cDNA FLJ11632 fis, clone HE | 1.42 | 2.03 |
| 433282 | BE539101 | Hs.5324 | hypothetical protein | 0.33 | 0.20 |
| 456898 | NM_001928 | Hs.155597 | D component of complement (adipsin) | 1.50 | 0.95 |
| 458126 | AW979136 | Hs.124629 | ESTs | 1.34 | 1.32 |
| 414005 | AA134489 | Hs.269379 | ESTs | 1.52 | 2.07 |
| 411496 | AW849241 | | gb: IL3-CT0215-210200-088-E03 CT0215 Homo | 1.10 | 2.21 |
| 451147 | AA016982 | Hs.64341 | ESTs | 1.53 | 2.29 |
| 450238 | T89693 | Hs.138777 | ESTs | 1.32 | 2.28 |
| 449284 | BE502240 | Hs.38592 | hypothetical protein FLJ23342 | 1.46 | 1.40 |
| 449479 | AI797619 | Hs.197659 | ESTs | 0.72 | 0.66 |
| 403066 | | | Target Exon | 1.32 | 1.19 |
| 410118 | AW590680 | Hs.110802 | von Willebrand factor | 1.72 | 2.54 |
| 437674 | AI749921 | Hs.205377 | ESTs | 1.38 | 2.21 |
| 431065 | AA491286 | Hs.128792 | ESTs | 1.30 | 2.08 |
| 416352 | H78006 | Hs.19553 | ESTs | 1.05 | 1.14 |
| 452565 | BE066552 | | gb: RC3-BT0333-300300-017-h08 BT0333 Homo | 1.46 | 2.53 |
| 418115 | AW005376 | Hs.173280 | ESTs | 1.20 | 0.98 |
| 422031 | R66895 | Hs.28788 | ESTs | 1.37 | 1.37 |
| 446269 | AW263155 | Hs.14559 | hypothetical protein FLJ10540 | 1.64 | 2.20 |
| 457683 | AI821877 | Hs.140002 | ESTs, Moderately similar to ALU7_HUMAN A | 1.03 | 2.35 |
| 435521 | W23814 | Hs.6361 | mitogen-activated protein kinase kinase | 0.73 | 0.59 |
| 438874 | H02780 | Hs.347520 | gb: yj41a11.r1 Soares placenta Nb2HP Homo | 1.56 | 2.73 |
| 441167 | AA921754 | Hs.211781 | ESTs | 1.74 | 2.12 |
| 455917 | BE156765 | | gb: RC1-HT0370-120100-012-c09 HT0370 Homo | 1.29 | 1.35 |
| 419058 | AW675039 | Hs.1227 | aminolevulinate, delta-, dehydratase | 2.04 | 1.83 |
| 408651 | BE266928 | Hs.17126 | hypothetical protein MGC15912 | 1.30 | 1.23 |
| 442737 | AB002319 | Hs.8663 | KIAA0321 protein | 0.85 | 0.79 |
| 407134 | T51588 | | gb: yb27e06.s1 Stratagene fetal spleen (9 | 1.23 | 0.97 |
| 447492 | AI381619 | Hs.20188 | ESTs | 1.26 | 2.28 |
| 437840 | AA884836 | Hs.292014 | ESTs | 2.05 | 2.29 |
| 412294 | AA689219 | Hs.117176 | poly(A)-binding protein, nuclear 1 | 1.47 | 3.55 |
| 419909 | AL136653 | Hs.93675 | decidual protein induced by progesterone | 1.10 | 2.18 |
| 432569 | AI131140 | Hs.152434 | ESTs | 1.34 | 1.83 |
| 412252 | AW903782 | | gb: CM4-NN1032-190400-527-g09 NN1032 Homo | 1.26 | 2.00 |
| 444298 | Z17870 | | gb: HSDHII020 Stratagene cDNA library Hum | 1.36 | 2.68 |
| 445261 | T79759 | Hs.250651 | ESTs, Weakly similar to I38022 hypotheti | 0.95 | 2.23 |
| 418315 | T06475 | Hs.124962 | Homo sapiens, clone IMAGE: 3510191, mRNA, | 0.82 | 0.82 |
| 440357 | AA379353 | Hs.20950 | phospholysine phosphohistidine inorganic | 0.83 | 0.68 |
| 440867 | AI417007 | Hs.166338 | ESTs | 1.45 | 1.50 |
| 410956 | AW938322 | | gb: PM1-DT0054-231299-002-c02 DT0054 Homo | 1.06 | 2.95 |
| 446574 | AI310135 | Hs.335933 | ESTs | 1.54 | 2.45 |
| 447912 | AW576549 | Hs.165728 | ESTs, Weakly similar to I38022 hypotheti | 1.22 | 2.07 |
| 457741 | BE044740 | | gb: hm55g10.x1 NCI_CGAP_RDF1 Homo sapiens | 1.89 | 2.08 |
| 433762 | AA732484 | Hs.169399 | ESTs | 1.24 | 2.58 |
| 418156 | W17056 | Hs.83623 | nuclear receptor subfamily 1, group I, m | 3.71 | 1.38 |
| 409282 | AW966480 | | gb: EST378554 MAGE resequences, MAGI Homo | 1.70 | 1.70 |
| 425169 | AW292500 | Hs.128514 | ESTs | 1.13 | 1.12 |
| 458497 | AI161428 | Hs.75916 | splicing factor 3b, subunit 2, 145 kD | 1.26 | 2.28 |
| 405673 | | | NM_022775: Homo sapiens hypothetical prot | 2.00 | 1.00 |
| 442691 | AW341438 | Hs.278036 | ESTs | 1.38 | 2.28 |
| 424316 | AA676403 | Hs.145078 | regulator of differentiation (in S. pomb | 1.06 | 2.10 |
| 444608 | AI174683 | Hs.329863 | ESTs | 1.95 | 1.82 |
| 447345 | BE247767 | Hs.18166 | KIAA0870 protein | 1.26 | 2.10 |
| 439848 | AW979249 | | gb: EST391359 MAGE resequences, MAGP Homo | 1.68 | 2.63 |
| 428946 | D42046 | Hs.194665 | DNA2 (DNA replication helicase, yeast, h | 1.32 | 2.33 |
| 403214 | | | NM_016232*: Homo sapiens interleukin 1 re | 1.02 | 2.15 |
| 404495 | | | C8001441*: gi\|8923061\|ref\|NP_060114.1\|hy | 2.20 | 2.49 |
| 443471 | AW236939 | Hs.172154 | Homo sapiens clone FLB3442 PRO0872 mRNA, | 1.58 | 1.74 |
| 437116 | AL049253 | Hs.190162 | ESTs | 1.22 | 2.53 |
| 451357 | AB020640 | Hs.26319 | Human DNA sequence from clone RP3-467L1 | 0.94 | 2.35 |
| 408255 | AW807321 | | gb: MR4-ST0062-240300-003-g05 ST0062 Homo | 1.12 | 1.39 |
| 448931 | AI597806 | Hs.192671 | ESTs | 1.30 | 3.29 |
| 422343 | AI628633 | Hs.346823 | gb: ty77d05.x1 NCI_CGAP_Kid11 Homo sapien | 1.86 | 2.32 |
| 407140 | AA059106 | Hs.271780 | ESTs, Weakly similar to I38022 hypotheti | 1.37 | 1.01 |
| 429187 | AA447648 | Hs.163872 | ESTs, Weakly similar to S65657 alpha-1C- | 1.74 | 1.55 |
| 423614 | AI457640 | Hs.206632 | ESTs | 1.48 | 2.83 |
| 429073 | AA446167 | Hs.47385 | ESTs | 1.24 | 2.00 |
| 415732 | AA167566 | Hs.271570 | ESTs, Weakly similar to 2109260A B cell | 1.31 | 2.34 |
| 412634 | U55984 | Hs.289088 | heat shock 90 kD protein 1, alpha | 0.42 | 0.22 |
| 415274 | AF001548 | Hs.78344 | myosin, heavy polypeptide 11, smooth mus | 1.94 | 1.27 |
| 415007 | BE244332 | Hs.77770 | adaptor-related protein complex 3, mu 2 | 0.78 | 0.71 |
| 402654 | | | Target Exon | 0.90 | 0.85 |
| 457974 | AW842353 | Hs.321717 | ESTs, Weakly similar to S22765 heterogen | 0.86 | 0.90 |
| 405340 | | | C2002952: gi\|1345964\|sp\|P10079\|FBP1_STRPU | 1.46 | 2.33 |
| 426259 | BE395776 | Hs.168640 | ankylosis, progressive (mouse) homolog | 1.63 | 2.75 |
| 442237 | AW905607 | Hs.24567 | ESTs, Weakly similar to KBF3_HUMAN NUCLE | 1.08 | 3.38 |
| 456370 | AA234938 | Hs.87384 | ESTs | 0.77 | 2.83 |
| 407041 | X15673 | | gb: Human pTR2 mRNA for repetitive sequen | 2.00 | 1.84 |
| 452001 | AI827675 | Hs.274281 | fidgetin | 1.38 | 2.03 |
| 445137 | AI733837 | Hs.145661 | ESTs | 1.60 | 3.00 |
| 440808 | AK001339 | Hs.7432 | hypothetical protein FLJ10477 | 1.17 | 2.10 |
| 404418 | | | Target Exon | 1.90 | 3.36 |
| 447658 | AI916872 | Hs.213424 | ESTs | 1.90 | 2.21 |
| 434414 | AI798376 | | gb: tr34b07.x1 NCI_CGAP_Ov23 Homo sapiens | 1.58 | 1.24 |
| 400834 | | | NM_002240*: Homo sapiens potassium inward | 1.25 | 2.33 |
| 449542 | AW857362 | Hs.268855 | ESTs, Weakly similar to I38022 hypotheti | 1.46 | 1.28 |
| 441043 | AA913422 | Hs.192104 | ESTs | 1.26 | 1.09 |
| 403391 | | | C3001164*: gi\|1730196\|sp\|P50573\|GAR3_RAT | 1.46 | 2.55 |
| 449129 | AI631602 | Hs.258949 | ESTs | 1.27 | 2.48 |
| 418321 | D63477 | Hs.84087 | KIAA0143 protein | 0.56 | 0.52 |
| 426789 | F06596 | Hs.23837 | Homo sapiens cDNA FLJ11812 fis, clone HE | 1.31 | 2.06 |
| 443679 | AK001810 | Hs.9670 | hypothetical protein FLJ10948 | 1.34 | 1.22 |
| 428554 | R46070 | Hs.6407 | ESTs | 1.04 | 2.08 |
| 401890 | | | Target Exon | 1.24 | 1.14 |
| 419501 | AW843822 | | gb: CM4-CN0045-010200-514-f08 CN0045 Homo | 1.74 | 1.38 |
| 457096 | AI809202 | Hs.208343 | ESTs, Weakly similar to cerebroside sulf | 0.82 | 0.87 |
| 426123 | AA370352 | | gb: EST82246 Prostate gland I Homo sapien | 1.28 | 2.35 |
| 449445 | AW197349 | Hs.232197 | ESTs | 1.24 | 2.13 |
| 430683 | AC004862 | Hs.247768 | Homo sapiens PAC clone RP4-697H17 from 7 | 1.30 | 2.00 |
| 440642 | AI744995 | | ESTs, Moderately similar to ALU4_HUMAN A | 1.29 | 2.44 |
| 455236 | AW875972 | | gb: CM3-PT0014-071299-051-b05 PT0014 Homo | 1.78 | 2.95 |
| 449622 | AW013915 | Hs.196578 | ESTs | 1.42 | 2.20 |
| 415116 | AA160363 | Hs.269956 | ESTs | 2.02 | 1.03 |
| 457269 | AI338993 | Hs.134535 | ESTs | 1.93 | 1.35 |
| 427877 | AW138725 | Hs.178067 | ESTs | 1.91 | 2.42 |
| 454631 | AW811324 | | gb: IL3-ST0141-131099-017-A02 ST0141 Homo | 1.00 | 3.13 |
| 458390 | AI792585 | Hs.133272 | ESTs, Weakly similar to ALUC_HUMAN !!!! | 1.02 | 2.21 |
| 435844 | AA700856 | Hs.59651 | ESTs, Weakly similar to 178885 serine/th | 0.85 | 0.81 |
| 427237 | AA399964 | Hs.97763 | ESTs | 1.57 | 1.44 |
| 408855 | T83061 | Hs.319946 | Homo sapiens mRNA for KIAA1727 protein, | 1.20 | 3.13 |
| 442151 | AI733404 | Hs.128865 | ESTs | 1.50 | 2.13 |
| 412708 | R26830 | Hs.106137 | ESTs, Weakly similar to CGHU7L collagen | 1.16 | 3.00 |
| 417262 | AA195276 | Hs.263858 | ESTs, Moderately similar to B34087 hypot | 1.25 | 2.40 |
| 419362 | N64116 | Hs.24624 | hypothetical protein FLJ21945 | 1.38 | 2.48 |
| 447248 | AW295831 | Hs.6496 | ESTs | 1.56 | 2.03 |
| 415622 | F13010 | Hs.12400 | ESTs | 1.48 | 2.30 |
| 414065 | AW515373 | Hs.271249 | Homo sapiens cDNA FLJ13580 fis, clone PL | 1.26 | 2.88 |
| 414585 | W46954 | Hs.334716 | hypothetical protein MGC16291 | 1.24 | 2.05 |
| 443197 | Z43613 | | gb: HSC1GD091 normalized infant brain cDN | 1.11 | 2.04 |
| 428266 | AI382001 | Hs.43590 | ESTs | 1.09 | 2.03 |
| 447083 | AI472124 | Hs.157757 | ESTs | 1.66 | 3.53 |
| 412302 | AW936334 | | gb: QV4-DT0021-281299-070-g05 DT0021 Homo | 1.74 | 3.00 |
| 445555 | AW974013 | | ESTs | 1.32 | 1.29 |
| 453117 | AW162044 | Hs.104203 | hypothetical protein MGC12981 | 0.73 | 0.81 |
| 436757 | AW975663 | Hs.293404 | ESTs, Weakly similar to ALU1_HUMAN ALU S | 2.21 | 1.88 |
| 431976 | AA719001 | Hs.291065 | ESTs | 1.23 | 2.01 |
| 430657 | AA482910 | Hs.279664 | ESTs | 1.64 | 2.65 |
| 438744 | BE314727 | Hs.75721 | profilin 1 | 0.85 | 0.85 |
| 439325 | AF086139 | Hs.150423 | cyclin-dependent kinase 9 (CDC2-related | 1.16 | 2.05 |
| 438117 | AA328041 | Hs.194329 | hypothetical protein FLJ21174 | 0.79 | 0.76 |
| 401686 | | | NM_014587*: Homo sapiens SRY (sex determi | 1.32 | 2.31 |
| 420269 | U72937 | Hs.96264 | alpha thalassemia/mental retardation syn | 0.78 | 0.53 |
| 434288 | AW189075 | Hs.116265 | fibrillin3 | 2.42 | 4.23 |
| 433215 | AB040912 | Hs.191098 | hypothetical protein FLJ11598 | 1.36 | 1.36 |
| 413429 | BE139117 | Hs.278881 | ESTs | 1.30 | 2.98 |
| 426417 | AA377908 | Hs.13254 | ESTs | 1.36 | 1.77 |
| 413882 | AA132973 | Hs.184492 | ESTs | 1.55 | 2.10 |
| 413346 | AA128586 | | gb: zI24h06.r1 Soares_pregnant_uterus_NbH | 1.29 | 1.77 |
| 445020 | AI205655 | Hs.147221 | ESTs | 1.90 | 2.00 |
| 418175 | AW967054 | Hs.206312 | ESTs, Weakly similar to I38022 hypotheti | 1.60 | 3.70 |
| 429582 | AI569068 | Hs.22247 | ESTs | 1.06 | 2.38 |
| 409134 | AW340389 | Hs.250585 | ESTs | 1.64 | 2.57 |
| 415642 | U19878 | Hs.336224 | transmembrane protein with EGF-like and | 0.73 | 2.33 |
| 435667 | F13625 | Hs.124183 | ESTs | 1.10 | 2.33 |
| 440513 | BE407106 | Hs.65907 | Homo sapiens, clone IMAGE: 3959816, mRNA, | 0.85 | 2.03 |
| 419711 | C02621 | Hs.159282 | ESTs | 1.22 | 2.00 |
| 434249 | AA987537 | Hs.129875 | ESTs | 1.29 | 2.48 |
| 437355 | AL359557 | Hs.306508 | Homo sapiens mRNA; cDNA DKFZp762O1415 (f | 1.86 | 2.08 |
| 428360 | H10291 | Hs.30974 | ESTs | 1.40 | 2.05 |
| 435339 | AI358300 | Hs.129827 | ESTs | 1.38 | 2.18 |
| 435345 | AW360966 | Hs.6653 | ESTs | 1.49 | 2.27 |
| 435105 | AI878982 | Hs.131859 | Homo sapiens F-box protein FBX11 mRNA, p | 1.78 | 2.33 |
| 459645 | AA074346 | Hs.250715 | ESTs | 1.50 | 2.40 |
| 449691 | AA002143 | Hs.21413 | solute carrier family 12, (potassium-chl | 0.74 | 0.69 |
| 425955 | T96509 | Hs.248549 | ESTs, Moderately similar to S65657 alpha | 1.42 | 2.76 |
| 437272 | AW975957 | | gb: EST388066 MAGE resequences, MAGN Homo | 1.00 | 2.16 |
| 456955 | NM_006925 | Hs.166975 | splicing factor, arginine/serine-rich 5 | 0.84 | 0.81 |
| 421362 | AK000050 | Hs.103853 | hypothetical protein FLJ20043 | 1.30 | 2.21 |
| 457926 | AA452378 | Hs.11637 | Homo sapiens mRNA; cDNA DKFZp547J125 (fr | 1.27 | 2.12 |
| 444557 | AI167637 | Hs.146924 | ESTs | 1.83 | 2.35 |
| 434476 | AW858520 | Hs.84264 | acidic protein rich in leucines | 1.43 | 3.80 |
| 458059 | AW015588 | Hs.137232 | ESTs, Weakly similar to S65657 alpha-1C- | 1.30 | 2.23 |
| 413595 | AW235215 | Hs.16145 | ESTs | 2.10 | 2.43 |
| 417281 | R98773 | Hs.268883 | ESTs | 1.26 | 2.10 |
| 445689 | BE158869 | | gb: QV0-HT0398-210100-096-f08 HT0398 Homo | 1.15 | 2.15 |
| 423249 | AA323682 | Hs.125374 | ESTs, Weakly similar to S26689 hypotheti | 1.76 | 1.50 |
| 408366 | AW511255 | Hs.346442 | ESTs | 1.74 | 2.91 |
| 441359 | AI435179 | Hs.126820 | ESTs | 2.43 | 1.59 |
| 413068 | BE063792 | | gb: QV3-BT0295-260100-066-d06 BT0295 Homo | 1.52 | 2.09 |
| 441322 | AW071851 | Hs.130628 | ESTs | 1.42 | 2.10 |
| 409124 | AW292809 | Hs.50727 | N-acetylglucosaminidase, alpha- (Sanfili | 1.11 | 2.20 |
| 432413 | AK000257 | Hs.274505 | Homo sapiens mRNA; cDNA DKFZp564A216 (fr | 1.10 | 2.25 |
| 425391 | AI248252 | Hs.160672 | ESTs | 1.17 | 2.38 |
| 443861 | AW449462 | Hs.134743 | ESTs | 1.44 | 2.30 |
| 454609 | AW810204 | | gb: MR4-ST0125-021199-017-d08 ST0125 Homo | 2.30 | 1.33 |
| 425893 | AA629695 | | gb: ad43b07.s1 Stratagene lung carcinoma | 1.76 | 2.51 |
| 443611 | NM_014397 | Hs.9625 | NIMA (never in mitosis gene a)-related k | 1.81 | 2.90 |
| 410359 | R38624 | Hs.106313 | ESTs | 1.78 | 2.05 |
| 406308 | | | NM_025192: Homo sapiens hypothetical prot | 1.92 | 2.24 |
| 432476 | T94344 | Hs.326263 | ESTs | 1.40 | 2.45 |
| 435073 | AA664078 | | gb: ac04a05.s1 Stratagene lung (937210) H | 1.66 | 2.26 |
| 420581 | AA278459 | Hs.151940 | ESTs | 1.48 | 2.58 |
| 435579 | AI332373 | Hs.156924 | ESTs | 1.46 | 2.68 |
| 439633 | AF086464 | Hs.86248 | ESTs | 1.40 | 2.48 |
| 430551 | AA481150 | Hs.136343 | ESTs | 1.40 | 2.28 |
| 450855 | T97988 | Hs.295605 | mannosidase, alpha, class 2A, member 2 | 1.48 | 2.40 |
| 444326 | AI939357 | Hs.270710 | ESTs | 0.88 | 2.28 |
| 412149 | R49355 | Hs.273824 | ESTs | 1.58 | 2.19 |
| 455116 | AW857271 | | gb: CM0-CT0307-210100-158-g09 CT0307 Homo | 1.56 | 2.50 |
| 449626 | AA774247 | Hs.301637 | zinc finger protein 258 | 0.60 | 0.53 |
| 410047 | AI167810 | Hs.132390 | zinc finger protein 36 (KOX 18) | 0.66 | 0.58 |
| 418865 | AW117500 | Hs.104241 | ESTs | 1.58 | 2.63 |
| 402762 | | | ENSP00000235171*: GAP junction beta-4 pro | 0.81 | 0.82 |
| 436449 | AI418027 | Hs.120361 | ESTs | 1.46 | 1.46 |
| 403488 | | | ENSP00000201948: KARYOPHERIN BETA2B HOMOL | 1.38 | 2.23 |
| 431235 | AA318271 | Hs.250905 | hypothetical protein | 1.14 | 2.55 |
| 448576 | AB026730 | Hs.21495 | UDP-Gal: betaGlcNAc beta 1,3-galactosyltr | 0.70 | 0.78 |
| 408100 | AW205382 | Hs.42676 | KIAA0781 protein | 1.36 | 2.66 |
| 433436 | AW162474 | | Bruno (Drosophila)-like 6, RNA binding | 1.50 | 2.15 |
| 422337 | R38572 | | gb: yc87c11.s1 Soares infant brain 1NIB H | 2.23 | 1.71 |
| 426160 | AA206020 | Hs.167460 | splicing factor, arginine/serine-rich 3 | 1.08 | 2.09 |
| 447008 | BE010189 | | nuclear receptor subfamily 1, group I, m | 1.26 | 1.27 |
| 420141 | AA702961 | Hs.124103 | ESTs, Weakly similar to I38344 titin, ca | 1.46 | 2.60 |
| 423840 | AA332434 | Hs.72465 | ESTs, Weakly similar to non-lens beta ga | 1.26 | 2.47 |
| 447793 | AI424924 | Hs.211203 | ESTs | 2.38 | 1.83 |
| 407328 | AA508857 | Hs.187748 | ESTs, Weakly similar to ALU1_HUMAN ALU S | 1.11 | 2.54 |
| 432451 | AW972771 | Hs.292471 | ESTs, Weakly similar to ALU1_HUMAN ALU S | 1.63 | 2.05 |
| 421311 | N71848 | Hs.283609 | hypothetical protein PRO2032 | 0.51 | 0.44 |
| 444649 | AW207523 | Hs.197628 | ESTs | 1.21 | 2.24 |
| 448688 | R94570 | Hs.266869 | ESTs, Weakly similar to ALU1_HUMAN ALU S | 1.91 | 3.25 |
| 428847 | AI954833 | Hs.98881 | ESTs | 1.48 | 2.66 |
| 413750 | BE161453 | | gb: IL2-HT0437-290200-045-A06 HT0437 Homo | 1.22 | 1.00 |
| 429355 | AW973253 | Hs.292689 | ESTs | 1.86 | 2.35 |
| 427798 | AA412499 | Hs.104779 | ESTs | 1.82 | 2.33 |
| 431179 | AI338644 | Hs.195432 | aldehyde dehydrogenase 2 family (mitocho | 0.80 | 2.00 |
| 451719 | AI373532 | Hs.157910 | ESTs | 1.29 | 3.85 |
| 438094 | AI821755 | Hs.131805 | ESTs, Weakly similar to A56194 thromboxa | 1.74 | 2.54 |
| 418504 | BE159718 | Hs.85335 | Homo sapiens mRNA; cDNA DKFZp564D1462 (f | 0.52 | 0.49 |
| 467414 | AF072164 | | gb: Homo sapiens HSFE-1 mRNA, partial cds | 1.67 | 2.28 |
| 416410 | H53777 | Hs.36822 | ESTs | 1.85 | 2.28 |
| 439141 | AI241470 | Hs.268982 | ESTs | 1.08 | 2.28 |
| 441181 | AA416925 | Hs.121076 | peptidylprolyl isomerase (cyclophilin)-l | 1.81 | 2.02 |
| 434482 | AF143331 | Hs.16073 | ESTs | 1.22 | 2.00 |
| 455757 | BE079531 | | gb: RC5-BT0624-240300-013-D08 BT0624 Homo | 1.53 | 2.16 |
| 425787 | AA363867 | Hs.155029 | ESTs | 0.76 | 2.13 |
| 405727 | | | CX001244: gi\|11420428\|ref\|XP_004814.1\|be | 1.70 | 2.21 |
| 441846 | AW850980 | | gb: IL3-CT0220-150200-068-B03 CT0220 Homo | 1.16 | 2.14 |
| 451945 | BE504055 | Hs.211420 | ESTs | 0.84 | 2.73 |
| 438432 | AW444990 | Hs.258800 | ESTs, Weakly similar to I38022 hypotheti | 1.60 | 2.43 |
| 451140 | AW411354 | Hs.26002 | LIM domain binding 1 | 1.14 | 1.20 |
| 407341 | AA918886 | Hs.204918 | ESTs, Weakly similar to ALU8_HUMAN ALU S | 1.03 | 2.42 |
| 453041 | AI680737 | Hs.289068 | Homo sapiens cDNA FLJ11918 fis, clone HE | 1.69 | 3.43 |
| 437613 | R19892 | Hs.10267 | MIL1 protein | 1.16 | 2.11 |
| 451507 | AW291109 | Hs.208787 | ESTs, Weakly similar to T31611 hypotheti | 1.22 | 2.05 |
| 430259 | BE550182 | Hs.127826 | RaIGEF-like protein 3, mouse homolog | 2.85 | 1.00 |
| 453669 | AL049029 | Hs.7258 | hypothetical protein FLJ22021 | 0.75 | 0.64 |
| 455065 | AW854352 | | gb: RC3-CT0255-200100-024-g10 CT0255 Homo | 1.49 | 2.20 |
| 442220 | AL037800 | Hs.8148 | selenoprotein T | 0.50 | 0.18 |
| 437936 | AW798475 | Hs.288549 | hypothetical protein FLJ14710 | 1.50 | 2.44 |
| 442556 | AL137761 | Hs.8379 | Homo sapiens mRNA; cDNA DKFZp586L2424 (f | 0.54 | 0.37 |
| 405223 | | | Target Exon | 1.09 | 2.80 |
| 437225 | AW975982 | Hs.292935 | ESTs | 1.03 | 2.47 |
| 421101 | AF010446 | Hs.101840 | major histocompatibility complex, class | 0.72 | 0.57 |
| 436200 | R51386 | Hs.124881 | ESTs | 1.64 | 2.93 |
| 402025 | | | NM_021624: Homo sapiens histamine H4 rece | 1.52 | 2.28 |
| 407019 | U49973 | | gb: Human Tigger1 transposable element, c | 2.40 | 2.12 |
| 451305 | AW003571 | Hs.211191 | ESTs, Weakly similar to A46010 X-linked | 1.24 | 3.23 |
| 423450 | AJ290445 | Hs.128759 | KIAA0524 protein | 1.64 | 2.13 |
| 423139 | AW402725 | Hs.288560 | hypothetical protein FLJ21106 | 1.61 | 2.28 |
| 451763 | AW294647 | Hs.233634 | hypothetical protein FLJ14220 | 1.39 | 2.08 |
| 458915 | AI915689 | Hs.212781 | EST | 1.62 | 2.02 |
| 452829 | AI955579 | Hs.63368 | ESTs, Weakly similar to TRHY_HUMAN TRICH | 0.60 | 0.41 |
| 446383 | T05816 | Hs.92511 | ESTs | 2.08 | 1.48 |
| 432576 | AW157424 | Hs.165954 | ESTs, Weakly similar to I38022 hypotheti | 1.88 | 2.49 |
| 433820 | AI401627 | Hs.174067 | ESTs | 1.30 | 2.00 |
| 419719 | AA844700 | Hs.39297 | ESTs, Moderately similar to ALU1_HUMAN A | 1.33 | 2.00 |
| 415868 | H06728 | Hs.21017 | ESTs | 1.34 | 2.08 |
| 420738 | NM_004185 | Hs.258575 | wingless-type MMTV integration site fami | 1.42 | 2.29 |
| 446614 | AK001733 | Hs.15562 | hypothetical protein FLJ10871 | 0.79 | 0.78 |
| 404167 | | | NM_021956*: Homo sapiens glutamate recept | 1.62 | 2.55 |
| 417074 | Z49878 | Hs.81131 | guanidinoacetate N-methyltransferase | 0.72 | 0.75 |
| 401215 | | | C12000457*: gi\|7512178\|pir∥T30337 polypr | 1.14 | 2.08 |
| 421600 | AW893889 | Hs.323231 | Homo sapiens cDNA FLJ11946 fis, clone HE | 1.88 | 2.66 |
| 426248 | T18988 | Hs.293668 | ESTs | 1.17 | 3.44 |
| 454523 | AW803980 | | gb: PM0-UM0084-240300-001-G11 UM0084 Homo | 1.34 | 2.40 |
| 420656 | AA279098 | Hs.187636 | ESTs | 1.22 | 2.43 |
| 402833 | | | C1002508: gi\|6691937\|emb\|CAB65797.1\|(AL0 | 1.31 | 2.00 |
| 438910 | AA827921 | Hs.291858 | ESTs, Weakly similar to ALUC_HUMAN !!!! | 1.39 | 3.13 |
| 416170 | H42454 | Hs.220645 | ESTs | 0.99 | 2.18 |
| 433598 | AI762836 | Hs.271433 | ESTs, Moderately similar to ALU2_HUMAN A | 2.04 | 1.28 |
| 417699 | T91491 | Hs.119670 | ESTs | 1.36 | 2.50 |
| 459605 | AL045773 | | gb: DKFZp434F246_r1 434 (synonym: htes3) | 1.21 | 2.13 |
| 453204 | R10799 | Hs.191990 | ESTs | 3.12 | 2.98 |
| 458971 | AL119206 | Hs.126257 | ESTs, Weakly similar to ALU1_HUMAN ALU S | 1.34 | 2.09 |
| 457040 | N77624 | Hs.173717 | phosphatidic acid phosphatase type 2B | 1.68 | 2.00 |
| 400414 | AF083118 | Hs.283968 | Homo sapiens CATX-2 mRNA, complete cds | 1.70 | 2.54 |
| 426263 | AI908774 | Hs.259785 | carnitine palmitoyltransferase I, liver | 0.96 | 2.14 |
| 439334 | AI148976 | Hs.112062 | ESTs | 1.50 | 2.45 |
| 455527 | AW984479 | | gb: PM1-HN0012-220300-001-b12 HN0012 Homo | 1.46 | 2.28 |
| 408084 | AL040832 | Hs.160422 | Homo sapiens clone PP902 unknown mRNA | 1.61 | 2.23 |
| 432059 | AF227131 | Hs.272387 | taste receptor, type 2, member 4 | 1.66 | 2.15 |
| 429791 | AW015667 | Hs.119427 | ESTs | 1.51 | 2.83 |
| 438695 | AI885190 | Hs.156089 | ESTs, Weakly similar to repressor protei | 1.19 | 2.03 |
| 458139 | AI525711 | Hs.253147 | ESTs | 1.42 | 2.10 |
| 413035 | BE155563 | | gb: PM4-HT0352-171199-001-C05 HT0352 Homo | 1.62 | 2.30 |
| 422444 | AA310688 | | gb: EST181501 Jurkat T-cells V Homo sapie | 1.38 | 2.05 |
| 409546 | AW410190 | Hs.250624 | hypothetical protein MGC4473 | 1.87 | 2.18 |
| 411432 | AW846272 | | gb: QV0-CT0179-300999-024-d12 CT0179 Homo | 1.04 | 2.03 |
| 445327 | AI220082 | Hs.147722 | ESTs | 1.16 | 2.10 |
| 424628 | AB011136 | Hs.151385 | KlAA0564 protein | 0.61 | 0.63 |
| 440197 | AW340708 | Hs.317714 | pallid (mouse) homolog, pallidin | 0.56 | 0.39 |
| 409894 | BE081731 | | gb: QV2-BT0635-220400-158-e04 BT0635 Homo | 1.50 | 2.45 |
| 422776 | AA316987 | Hs.129846 | ESTs | 1.36 | 2.20 |
| 428255 | AI627478 | Hs.187670 | ESTs | 1.34 | 2.40 |
| 412484 | AA112090 | Hs.269961 | ESTs | 0.97 | 2.00 |
| 432789 | D26361 | Hs.3104 | KIAA0042 gene product | 1.44 | 2.73 |
| 430100 | AA766178 | Hs.291601 | ESTs, Highly similar to T00350 hypotheti | 1.06 | 2.02 |
| 419528 | AA244000 | Hs.222365 | ESTs | 1.34 | 2.06 |
| 441793 | AA968459 | Hs.158785 | ESTs | 1.80 | 2.70 |
| 429468 | AF033579 | | T-box 10 | 0.71 | 0.61 |
| 410248 | AA166653 | Hs.268171 | ESTs | 2.55 | 2.10 |
| 401818 | | | NM_000664*: Homo sapiens acetyl-Coenzyme | 1.76 | 2.58 |
| 451724 | AI903765 | | gb: UI-BT037-301298-102 BT037 Homo sapien | 1.64 | 2.28 |
| 431866 | NM_012098 | Hs.8025 | angiopoietin-like 2 | 1.56 | 2.36 |
| 432719 | AW935411 | Hs.314460 | ESTs | 1.36 | 2.25 |
| 418977 | AA233094 | Hs.191517 | ESTs | 2.06 | 3.60 |
| 404220 | | | C6000989*: gi\|7573285\|emb\|CAB87644.1\| (AL | 1.54 | 2.23 |
| 446708 | BE549905 | Hs.231754 | ESTs | 1.35 | 2.16 |
| 453823 | AL137967 | | gb: DKFZp761D2315_r1 761 (synonym: hamy2) | 1.42 | 2.38 |
| 422050 | AA302741 | Hs.25786 | ESTs, Moderately similar to JC5238 galac | 1.40 | 2.50 |
| 400704 | | | Target Exon | 1.48 | 1.00 |
| 406104 | | | Target Exon | 1.22 | 2.03 |
| 411008 | AW813238 | | gb: MR3-ST0191-020200-207-d04 ST0191 Homo | 1.00 | 2.13 |
| 426582 | AA381797 | Hs.281121 | ESTs | 1.35 | 2.45 |
| 430853 | AI734179 | Hs.105676 | ESTs | 1.43 | 2.23 |
| 432420 | AL044659 | Hs.43791 | ESTs | 1.15 | 2.03 |
| 403197 | | | C2002793*: gi\|1353148\|sp\|Q09568\|YR86_CAEE | 0.52 | 0.47 |
| 432407 | AA221036 | | gb: zr03f12.r1 Stratagene NT2 neuronal pr | 1.93 | 2.23 |
| 414996 | AW747800 | Hs.55016 | hypothetical protein FLJ21935 | 1.56 | 2.72 |
| 401016 | | | ENSP00000227126: NAALADASE II PROTEIN. | 1.25 | 2.45 |
| 433335 | AA584134 | Hs.269454 | ESTs | 1.31 | 2.24 |
| 459668 | BE244127 | | gb: TCBAP1E0661 Pediatric pro-B cell acut | 1.16 | 2.03 |
| 437722 | AW292947 | Hs.122872 | ESTs, Weakly similar to JU0033 hypotheti | 3.75 | 2.72 |
| 452277 | AL049013 | Hs.28783 | KIAA1223 protein | 0.33 | 0.26 |
| 425712 | AA412548 | Hs.21423 | ESTs, Moderately similar to ALU1_HUMAN A | 1.34 | 2.21 |
| 427598 | AA406057 | Hs.97998 | ESTs | 1.06 | 2.05 |
| 412565 | M85975 | Hs.344069 | gb: EST02500 Fetal brain, Stratagene (cat | 1.24 | 2.59 |
| 422043 | AL133649 | Hs.110953 | retinoic acid induced 1 | 0.48 | 0.41 |
| 421814 | L12350 | Hs.108623 | thrombospondin 2 | 0.48 | 2.45 |
| 413645 | AA130992 | | gb: zo15e02.s1 Stratagene colon (937204) | 1.32 | 2.45 |
| 435563 | AF210317 | Hs.95497 | solute carrier family 2 (facilitated glu | 0.39 | 0.28 |
| 452396 | H10302 | Hs.112577 | ESTs | 1.60 | 2.45 |
| 440612 | BE561384 | | gb: 601344969F1 NIH_MGC_8 Homo sapiens cD | 1.08 | 2.60 |
| 454721 | AW815588 | | gb: QV0-ST0216-061299-066-a09 ST0216 Homo | 1.44 | 1.65 |
| 417796 | AA206141 | Hs.6786 | ESTs | 1.68 | 3.85 |
| 432864 | D16217 | Hs.279607 | calpastatin | 0.43 | 0.35 |
| 454480 | AA088375 | Hs.22612 | hypothetical protein DKFZp566D1346 | 2.19 | 1.91 |
| 434490 | AF143870 | Hs.15246 | ESTs | 2.26 | 2.07 |
| 418797 | AA515814 | | gb: ng64b03.s1 NCI_CGAP_Lip2 Homo sapiens | 1.42 | 2.55 |
| 403871 | | | C5001783*: gi\|780367\|gb\|AAB05844.1\| (L416 | 1.60 | 2.63 |
| 441283 | AA927670 | Hs.131704 | ESTs | 1.31 | 3.63 |
| 442250 | AW290871 | Hs.129121 | ESTs | 1.14 | 2.38 |
| 456747 | AL037357 | Hs.125864 | tropomodulin 2 (neuronal) | 1.61 | 1.26 |
| 425757 | AA363171 | | gb: EST72986 Ovary II Homo sapiens cDNA 5 | 1.29 | 2.95 |
| 405494 | | | C2001837*: gi\|12697903\|dbj\|BAB21770.1\|(A | 2.09 | 1.00 |
| 432250 | AA452088 | Hs.274170 | Opa-interacting protein 2 | 1.26 | 2.71 |
| 431911 | AK000156 | Hs.272193 | Homo sapiens cDNA FLJ20149 fis, clone CO | 1.46 | 2.60 |
| 413923 | AI733852 | Hs.199957 | ESTs | 1.62 | 2.10 |
| 449590 | AA694070 | Hs.268835 | ESTs | 1.20 | 2.53 |
| 438467 | AA808027 | Hs.123277 | ESTs | 1.48 | 2.10 |
| 432121 | AI824879 | Hs.211286 | ESTs, Weakly similar to 1207289A reverse | 1.27 | 3.13 |
| 412298 | AW936300 | | gb: QV4-DT0021-281299-070-a04 DT0021 Homo | 1.42 | 2.60 |
| 408519 | AA679082 | Hs.43481 | hypothetical protein DKFZp564K192 | 1.84 | 3.70 |
| 416067 | T79732 | Hs.14633 | ESTs | 1.11 | 3.08 |
| 420497 | AW206285 | Hs.253548 | ESTs | 1.90 | 2.48 |
| 405704 | | | NM_001844*: Homo sapiens collagen, type I | 1.42 | 2.90 |
| 423443 | AI432601 | Hs.168812 | Homo sapiens cDNA FLJ14132 fis, clone MA | 1.42 | 2.03 |
| 415904 | Z44679 | Hs.336391 | ESTs | 1.62 | 2.94 |
| 413786 | AW613780 | Hs.13500 | ESTs | 0.33 | 0.17 |
| 404031 | | | C5001700*: gi\|9256616\|ref\|NP_061761.1\|pr | 1.94 | 2.29 |
| 457412 | N40711 | Hs.333300 | hypothetical protein FLJ14026 | 1.92 | 3.20 |
| 439719 | AF086554 | Hs.326048 | Homo sapiens mRNA; cDNA DKFZp434M0420 (f | 1.62 | 2.30 |
| 418161 | AI950754 | Hs.81716 | ESTs | 1.81 | 2.42 |
| 425894 | AW954011 | Hs.180711 | ESTs | 0.92 | 2.20 |
| 419988 | W39388 | Hs.55336 | Homo sapiens, clone MGC: 17421, mRNA, com | 1.34 | 2.57 |
| 439668 | AI091277 | Hs.302634 | frizzled (Drosophila) homolog 8 | 1.67 | 2.66 |
| 450177 | AI698091 | Hs.107845 | ESTs | 1.50 | 2.25 |
| 459704 | AA719572 | Hs.274441 | Homo sapiens mRNA; cDNA DKFZp434N011 (fr | 1.27 | 3.35 |
| 410357 | AW663614 | | gb: hj22e04.x1 NCI_CGAP_Li8 Homo sapiens | 0.69 | 0.59 |
| 459234 | AI940425 | | gb: CM0-CT0052-150799-024-c04 CT0052 Homo | 1.67 | 2.08 |
| 421313 | NM_014923 | Hs.103329 | KIAA0970 protein | 0.57 | 0.26 |
| 431322 | AW970622 | | gb: EST382704 MAGE resequences, MAGK Homo | 1.80 | 2.73 |
| 423086 | AB028984 | Hs.123420 | KIAA1061 protein | 0.40 | 0.56 |
| 425980 | AA366951 | | gb: EST77963 Pancreas tumor III Homo sapi | 1.33 | 2.50 |
| 423185 | BE299590 | Hs.125078 | ornithine decarboxylase antizyme 1 | 0.60 | 0.56 |
| 410840 | AW806924 | | gb: QV4-ST0023-160400-172-h10 ST0023 Homo | 1.50 | 2.88 |
| 403917 | | | Target Exon | 1.82 | 2.02 |
| 437384 | AI674710 | Hs.174397 | ESTs | 1.26 | 2.05 |
| 444389 | AW439340 | Hs.189720 | ESTs | 1.26 | 2.13 |
| 443318 | AI051603 | Hs.133141 | ESTs | 1.46 | 2.20 |
| 441093 | AI698138 | Hs.126918 | ESTs | 1.40 | 2.35 |
| 439432 | AI984203 | Hs.57874 | ESTs | 0.88 | 2.18 |
| 454629 | AW811114 | | gb: MR2-ST0131-111199-016-a04 ST0131 Homo | 1.96 | 2.31 |
| 406207 | | | Target Exon | 2.77 | 2.55 |
| 444872 | AI936264 | | p30 DBC protein | 1.48 | 2.45 |
| 401908 | | | C17000154: gi\|12003980\|gb\|AAG43830.1\|AF21 | 1.15 | 2.28 |
| 404730 | | | Target Exon | 1.84 | 2.78 |
| 457498 | AI732230 | Hs.191737 | ESTs | 1.49 | 2.55 |
| 448471 | AA158617 | Hs.21276 | collagen, type IV, alpha 3 (Goodpasture | 0.37 | 0.36 |
| 438978 | AI095207 | Hs.307972 | ESTs | 1.57 | 2.39 |
| 418786 | AI796317 | Hs.203594 | Homo sapiens uncharacterized gastric pro | 2.86 | 3.34 |
| 400416 | AF083130 | | Homo sapiens CATX-14 mRNA, partial cds | 2.03 | 1.55 |
| 450446 | AI696334 | Hs.14450 | ESTs | 1.32 | 2.38 |
| 419791 | AI579909 | Hs.105104 | ESTs | 0.41 | 0.27 |
| 449436 | AA860329 | Hs.279307 | hypothetical protein DKFZp434I2117 | 2.01 | 1.50 |
| 430808 | L08603 | Hs.247980 | melanocortin 4 receptor | 1.09 | 2.18 |
| 443116 | AI033397 | Hs.132225 | ESTs | 1.30 | 2.25 |
| 437923 | BE088433 | Hs.334696 | hypothetical protein KIAA1335 | 1.40 | 2.50 |
| 403294 | | | Target Exon | 0.98 | 2.18 |
| 436007 | AI247716 | Hs.232168 | ESTs | 1.38 | 1.00 |
| 430649 | AB040941 | Hs.247713 | KIAA1508 protein | 1.52 | 2.85 |
| 437271 | AL137445 | Hs.28846 | Homo sapiens mRNA; cDNA DKFZp566O134 (fr | 1.29 | 2.59 |
| 444500 | AV651273 | Hs.282966 | ESTs, Moderately similar to 2109260A B c | 1.22 | 2.05 |
| 447434 | R16890 | Hs.137135 | ESTs | 1.72 | 2.85 |
| 400830 | | | NM_025006: Homo sapiens hypothetical prot | 2.04 | 2.68 |
| 428114 | AI821548 | Hs.98363 | ESTs, Weakly similar to I38022 hypotheti | 1.09 | 2.74 |
| 409688 | AI150485 | | gb: qf36a10.x1 Soares_testis_NHT Homo sap | 1.67 | 1.38 |
| 440781 | BE561823 | Hs.281434 | Homo sapiens cDNA FLJ14028 fis, clone HE | 1.28 | 2.50 |
| 442662 | U78168 | Hs.8578 | Rap 1 guanine-nucleotide-exchange factor | 1.92 | 2.28 |
| 443078 | M78728 | Hs.132694 | Homo sapiens cDNA: FLJ23149 fis, clone L | 1.42 | 2.03 |
| 440179 | AI990151 | Hs.125904 | ESTs | 1.49 | 2.63 |
| 446780 | R31107 | | gb: yh61g01.s1 Soares placenta Nb2HP Homo | 1.96 | 2.78 |
| 444173 | AI126432 | Hs.149493 | ESTs | 1.50 | 2.10 |
| 417939 | R53863 | Hs.337512 | ESTs, Weakly similar to ALUB_HUMAN !!!! | 1.60 | 2.03 |
| 428490 | BE301738 | Hs.49806 | ESTs, Weakly similar to A46010 X-linked | 0.47 | 0.44 |
| 443869 | AI141520 | Hs.151464 | ESTs, Weakly similar to ALUC_HUMAN !!!! | 1.25 | 2.68 |
| 426322 | J05068 | Hs.2012 | transcobalamin I (vitamin B12 binding pr | 2.12 | 1.15 |
| 411630 | U42349 | Hs.71119 | Putative prostate cancer tumor suppresso | 0.64 | 0.48 |
| 454701 | AW854930 | | gb: PM0-CT0263-201099-003-f06 CT0263 Homo | 1.30 | 2.33 |
| 439795 | N77294 | Hs.194294 | ESTs | 1.17 | 2.33 |
| 425546 | BE409762 | Hs.26118 | hypothetical protein MGC13033 | 1.17 | 2.85 |
| 411245 | AW833441 | | gb: QV4-TT0008-271099-020-g01 TT0008 Homo | 1.90 | 3.98 |
| 434957 | AF283775 | Hs.35380 | x 001 protein | 0.47 | 0.41 |
| 425724 | AA362525 | | gb: EST72223 Namalwa B cells I Homo sapie | 1.38 | 2.63 |
| 446847 | T51454 | Hs.82845 | Homo sapiens cDNA: FLJ21930 fis, clone H | 0.34 | 0.28 |
| 453216 | AL137566 | Hs.32405 | Homo sapiens mRNA; cDNA DKFZp586G0321 (f | 1.28 | 2.19 |
| 421718 | AL117574 | | Homo sapiens mRNA; cDNA DKFZp434L2221 (f | 2.04 | 1.79 |
| 415924 | H18047 | Hs.335821 | ESTs | 2.02 | 3.17 |
| 450850 | AA648886 | Hs.151999 | ESTs | 1.68 | 2.45 |
| 443153 | AI371823 | Hs.34079 | ESTs | 1.13 | 2.41 |
| 434420 | AA688278 | Hs.194864 | hypothetical protein FLJ22578 | 1.34 | 2.38 |
| 426126 | AL118747 | Hs.26691 | ESTs | 1.31 | 2.25 |
| 421926 | AA300591 | | gb: EST13437 Testis tumor Homo sapiens cD | 1.48 | 2.40 |
| 459563 | AI590487 | Hs.49760 | gb: tt77d04.x1 NCI_CGAP_HSC3 Homo sapiens | 1.74 | 3.33 |
| 453006 | AI362575 | Hs.303171 | ESTs | 1.17 | 2.24 |
| 437223 | C15105 | Hs.330716 | Homo sapiens cDNA FLJ14368 fis, clone HE | 0.54 | 0.46 |
| 417016 | AA837098 | Hs.269933 | ESTs | 1.04 | 2.18 |
| 420223 | N27807 | Hs.286 | ribosomal protein L4 | 2.08 | 3.10 |
| 425303 | AA354785 | | gb: EST63098 Jurkat T-cells V Homo sapien | 2.18 | 2.85 |
| 400375 | NM_014115 | | NM_014115*: Homo sapiens PRO0113 protein | 1.83 | 2.14 |
| 456169 | Y07909 | Hs.79368 | epithelial membrane protein 1 | 1.54 | 2.08 |
| 409707 | AA861773 | Hs.313501 | ESTs | 0.79 | 0.84 |
| 422241 | Y00062 | Hs.170121 | protein tyrosine phosphatase, receptor t | 1.46 | 2.06 |
| 443152 | AI803470 | Hs.204529 | KIAA1806 protein | 1.07 | 2.43 |
| 452714 | AW770994 | Hs.30340 | hypothetical protein KIAA1165 | 0.45 | 0.34 |
| 415110 | H04043 | | gb: yj45c03.r1 Soares placenta Nb2HP Homo | 1.62 | 2.07 |
| 443251 | BE185436 | Hs.278839 | ESTs | 1.34 | 2.05 |
| 433441 | R37094 | Hs.13742 | ESTs | 1.76 | 2.05 |
| 434612 | R76513 | Hs.301183 | molecule possessing ankyrin repeats indu | 0.83 | 2.88 |
| 417807 | R17806 | Hs.269452 | gb: yg09b06.r1 Soares infant brain 1NIB H | 1.30 | 2.23 |
| 426902 | AI125334 | Hs.97408 | ESTs | 1.94 | 2.20 |
| 436028 | AA731124 | Hs.120931 | ESTs | 2.01 | 1.73 |
| 428878 | AA436884 | Hs.48926 | ESTs | 1.22 | 2.17 |
| 439749 | AL389942 | Hs.157752 | Homo sapiens mRNA full length insert cDN | 1.32 | 2.75 |
| 442435 | AI986208 | Hs.244760 | ESTs, Highly similar to B34087 hypotheti | 2.09 | 3.13 |
| 416527 | T62507 | Hs.11038 | ESTs | 1.66 | 2.12 |
| 441808 | AW118601 | Hs.127887 | ESTs, Moderately similar to 1609195B blo | 1.22 | 2.58 |
| 417054 | AF017060 | Hs.174151 | aldehyde oxidase 1 | 2.57 | 1.48 |
| 446636 | AC002563 | Hs.15767 | citron (rho-interacting, serine/threonin | 1.16 | 2.23 |
| 418442 | AI873471 | Hs.186898 | ESTs | 1.39 | 2.26 |
| 416640 | BE262478 | Hs.79404 | neuron-specific protein | 0.31 | 0.26 |
| 403146 | | | Target Exon | 1.49 | 2.18 |
| 457397 | AW969025 | Hs.109154 | ESTs | 1.32 | 2.26 |
| 439189 | AI951185 | Hs.144630 | nuclear receptor subfamily 2, group F, m | 1.76 | 2.90 |
| 423969 | AI830571 | Hs.34969 | hypothetical protein DKFZp566N034 | 1.18 | 2.00 |
| 459683 | AI674906 | Hs.199460 | gb: wc73f02.x1 NCI_CGAP_Pan1 Homo sapiens | 1.74 | 2.00 |
| 426826 | AK001890 | Hs.172654 | guanine nucleotide binding protein beta | 2.04 | 1.60 |
| 414462 | BE622743 | Hs.301064 | arfaptin 1 | 0.40 | 0.29 |
| 438027 | N93047 | Hs.19131 | transcription factor Dp-2 (E2F dimerizat | 1.08 | 2.40 |
| 408623 | AW811978 | Hs.254037 | ESTs | 1.64 | 3.08 |
| 433765 | AA909619 | Hs.112668 | ESTs | 1.52 | 2.02 |
| 417132 | N56605 | Hs.269053 | ESTs | 1.64 | 2.51 |
| 416815 | U41514 | Hs.80120 | UDP-N-acetyl-alpha-D-galactosamine: polyp | 0.28 | 0.16 |
| 435186 | AL119470 | Hs.145631 | ESTs | 1.74 | 3.10 |
| 411107 | AW958042 | Hs.95870 | PTD015 protein | 0.49 | 0.24 |
| 406930 | U04691 | | gb: Human olfactory receptor (OR17-219) g | 2.21 | 3.88 |
| 411026 | AW813786 | | gb: RC3-ST0197-120200-015-b05 ST0197 Homo | 1.64 | 1.03 |
| 415766 | H01613 | Hs.50628 | adaptor-related protein complex 4, sigma | 1.64 | 2.51 |
| 446018 | AW631111 | Hs.249727 | gb: hh92e12.y1 NCI_CGAP_GU1 Homo sapiens | 1.56 | 2.48 |
| 440125 | AW238410 | Hs.253888 | ESTs | 1.46 | 2.25 |
| 449832 | AA694264 | Hs.60049 | ESTs | 1.27 | 2.33 |
| 431899 | AA521381 | Hs.187726 | ESTs | 1.11 | 2.53 |
| 431531 | BE142052 | Hs.62654 | kringle-containing transmembrane protein | 1.06 | 2.00 |
| 441077 | AI241273 | Hs.15312 | ESTs | 1.12 | 2.13 |
| 426799 | H14843 | Hs.303154 | popeye protein 3 | 0.61 | 0.51 |
| 419480 | BE536584 | Hs.122546 | hypothetical protein FLJ23017 | 1.88 | 2.38 |
| 455908 | BE156306 | | gb: QV0-HT0367-150200-114-h04 HT0367 Homo | 1.77 | 2.55 |
| 403332 | | | Target Exon | 1.46 | 2.60 |
| 455753 | BE075124 | | gb: PM1-BT0585-110200-003-h02 BT0585 Homo | 1.40 | 2.43 |
| 404429 | | | Target Exon | 1.31 | 2.01 |
| 438941 | AF075047 | Hs.31864 | ESTs | 1.34 | 2.21 |
| 428745 | AA433896 | Hs.201634 | ESTs | 1.72 | 2.06 |
| 411567 | AW851630 | | gb: MR2-CT0222-211099-002-h06 CT0222 Homo | 1.60 | 2.70 |
| 458714 | R20916 | Hs.344777 | ESTs | 0.93 | 2.07 |
| 426839 | M74782 | Hs.172689 | interleukin 3 receptor, alpha (low affin | 1.39 | 2.71 |
| 444539 | AI955765 | Hs.146907 | ESTs, Weakly similar to 2004399A chromos | 1.66 | 2.18 |
| 407322 | AA171892 | Hs.324570 | ESTs, Weakly similar to ALU3_HUMAN ALU S | 1.30 | 2.65 |
| 453826 | AL138129 | | gb: DKFZp547F152_r1 547 (synonym: hfbr1) | 1.52 | 2.73 |
| 435695 | AA694324 | Hs.257675 | ESTs | 1.24 | 2.00 |
| 402294 | | | Target Exon | 1.80 | 3.08 |
| 417759 | R13567 | Hs.12548 | ESTs | 1.63 | 2.58 |
| 417527 | AA203524 | | gb: zx56e10.r1 Soares_fetal_liver_spleen_{—} | 1.52 | 2.02 |
| 427526 | AA405062 | Hs.345830 | gb: zu12e04.r1 Soares_testis_NHT Homo sap | 2.03 | 1.90 |
| 455300 | AW891707 | | gb: CM3-NT0090-040500-171-e02 NT0090 Homo | 1.12 | 2.20 |
| 448121 | AL045714 | Hs.128653 | hypothetical protein DKFZp564F013 | 0.93 | 2.28 |
| 415855 | AI921875 | | gb: wp07e04.x1 NCI_CGAP_Kid12 Homo sapien | 1.43 | 2.08 |
| 425702 | N59555 | | gb: yv76f05.s1 Soares fetal liver spleen | 1.61 | 2.80 |
| 441056 | H37860 | Hs.125720 | ESTs | 1.11 | 2.10 |
| 400311 | AF072164 | Hs.137570 | Homo sapiens HSFE-1 mRNA, partial cds | 2.04 | 2.95 |
| 451478 | NM_012331 | Hs.26458 | methionine sulfoxide reductase A | 0.50 | 0.20 |
| 425288 | AA354502 | | gb: EST62799 Jurkat T-cells V Homo sapien | 0.99 | 2.08 |
| 456397 | W28339 | Hs.150580 | PTD010 protein | 1.11 | 2.29 |
| 405654 | | | C12001521: gi\|7513934\|pir∥T31081 cca3 pr | 2.30 | 1.00 |
| 450151 | AI088196 | Hs.22968 | Homo sapiens clone IMAGE: 451939, mRNA se | 1.21 | 2.60 |
| 419851 | AA287987 | Hs.13477 | ESTs, Weakly similar to 1207289A reverse | 1.26 | 2.60 |
| 406016 | | | Target Exon | 0.57 | 0.48 |
| 440903 | AI468079 | Hs.126623 | ESTs | 2.02 | 1.61 |
| 445026 | W90337 | Hs.282966 | ESTs, Moderately similar to 2109260A B c | 1.56 | 2.23 |
| 414182 | AA136301 | Hs.344442 | KIAA1105 protein | 1.32 | 2.55 |
| 457048 | AA400352 | Hs.112861 | ESTs | 1.54 | 2.05 |
| 440542 | AA889143 | Hs.295655 | ESTs, Weakly similar to PC4259 ferritin | 1.48 | 2.15 |
| 422857 | R71461 | | gb: yi51h07.r1 Soares placenta Nb2HP Homo | 1.42 | 2.78 |
| 445948 | AW444662 | Hs.202247 | ESTs | 1.50 | 2.48 |
| 454002 | BE299567 | Hs.271749 | ESTs, Moderately similar to ALU8_HUMAN A | 1.31 | 2.25 |
| 413656 | T91703 | | gb: ye20g09.s1 Stratagene lung (937210) H | 2.10 | 1.69 |
| 420441 | AI986160 | Hs.180383 | dual specificity phosphatase 6 | 0.99 | 2.33 |
| 412062 | H09124 | Hs.202341 | Homo sapiens cDNA: FLJ23573 fis, clone L | 2.14 | 1.61 |
| 408991 | BE501816 | Hs.281927 | ESTs | 1.76 | 2.83 |
| 432534 | AW361626 | Hs.339833 | hypothetical protein FLJ11240 | 0.41 | 0.28 |
| 435136 | R27299 | Hs.10172 | ESTs | 0.76 | 3.40 |
| 451052 | AA281504 | Hs.24444 | Homo sapiens cDNA: FLJ22165 fis, clone H | 2.16 | 1.85 |
| 413928 | AA442498 | Hs.6700 | ESTs, Moderately similar to Z195_HUMAN Z | 1.30 | 2.00 |
| 439448 | AA970788 | Hs.257586 | ESTs | 1.87 | 2.23 |
| 403344 | | | NM_000341: Homo sapiens solute carrier fa | 1.36 | 2.22 |
| 418056 | AA524886 | | gb: nh34f02.s1 NCI_CGAP_Pr3 Homo sapiens | 1.42 | 2.85 |
| 435428 | AI791746 | Hs.130293 | ESTs | 2.44 | 1.32 |
| 419964 | AA811657 | Hs.220913 | ESTs | 1.32 | 2.08 |
| 440926 | AW196772 | Hs.131323 | ESTs | 1.80 | 2.65 |
| 452625 | AA724771 | Hs.61425 | ESTs | 1.64 | 2.18 |
| 452797 | AI369787 | Hs.7146 | ESTs | 1.47 | 3.16 |
| 436120 | AI248193 | Hs.119860 | ESTs | 1.41 | 2.83 |
| 449567 | AI990790 | Hs.188614 | ESTs | 1.48 | 2.45 |
| 409628 | AB021865 | Hs.55276 | potassium voltage-gated channel, Shal-re | 1.70 | 2.23 |
| 416617 | H69311 | Hs.205980 | ESTs | 1.83 | 2.04 |
| 452266 | AI767250 | Hs.165240 | ESTs | 0.58 | 0.43 |
| 404606 | | | Target Exon | 1.47 | 3.75 |
| 401814 | | | Target Exon | 2.00 | 1.91 |
| 428403 | AI393048 | Hs.326159 | leucine rich repeat (in FLII) interactin | 0.33 | 0.21 |
| 433390 | AA586950 | Hs.260180 | Homo sapiens mRNA; cDNA DKFZp761G18121 ( | 2.00 | 4.90 |
| 451443 | AW295527 | Hs.210303 | ESTs | 1.87 | 2.25 |
| 411188 | BE161168 | | gb: PM0-HT0425-170100-002-a10 HT0425 Homo | 2.15 | 1.69 |
| 452704 | AA027823 | Hs.149424 | Homo sapiens PNAS-130 mRNA, complete cds | 2.64 | 1.65 |
| 424060 | X92108 | | H. sapiens mRNA for subtelomeric repeat s | 2.40 | 2.58 |
| 433331 | AI738815 | Hs.117323 | ESTs | 1.46 | 2.10 |
| 428520 | AA331901 | Hs.184736 | hypothetical protein FLJ10097 | 0.44 | 0.19 |
| 439492 | AF086310 | Hs.103159 | ESTs | 0.42 | 0.26 |
| 426736 | AA431615 | Hs.130722 | ESTs | 1.90 | 2.45 |
| 416225 | AA577730 | Hs.188684 | ESTs, Weakly similar to PC4259 ferritin | 2.72 | 6.25 |
| 404917 | | | Target Exon | 1.60 | 2.15 |
| 448955 | AW207597 | Hs.28102 | ESTs | 2.08 | 1.75 |
| 402797 | | | Target Exon | 2.12 | 1.37 |
| 457951 | U23860 | | gb: Human clone mcag19 chromosome 16 CTG | 1.72 | 2.00 |
| 426982 | AA149707 | Hs.173091 | ubiquitin-like 3 | 0.36 | 0.17 |

Pkey: Unique Eos probeset identifier number
ExAccn: Exemplar Accession number, Genbank accession number
UnigeneID: Unigene number
Unigene Title: Unigene gene title
R1: 80th percentile of Ta or T1 tumor Als from patients who upstaged divided by 80th percentile of Ta or T1 tumor Als from patients who did not upstage
R2: median of Ta or T1 tumor Als from patients who upstaged divided by the median of Ta or T1 tumor Als from patients who did not upstage

[0383] TABLE 8B

| Pkey | CAT Number | Accession |
|---|---|---|
| 408139 | 10421_1 | AA451966 NM_016370 AB036693 AL139228 R58124 AI634847 AL119333 W07356 AI334284 H29050 |
| | | AI192685 AA652438 AW172843 W19794 N21460 AI743862 AW130622 AA991348 AI204553 AA992664 |
| | | N80848 AA699329 AI824676 R26624 R49653 |
| 408255 | 1049351_1 | AW807321 AW807262 AW177104 AW807319 AW807115 AW807344 AW807324 AW178116 BE141575 |
| | | AW845849 AW807105 AW845868 BE140942 AW807178 AW807167 AW807398 AW807320 AW807306 AW845866 |
| 408283 | 1050275_1 | BE141579 AW807555 AW807502 BE141596 AW845845 AW807500 AW845864 |
| | | AW807480 AW807486 AW807478 AW178109 AW807228 AW807374 AW807125 AW846124 AW807470 |
| | | AW807477 AW807510 AW807208 BE141573 AW807465 |
| 408839 | 1085657_1 | AW277084 R27662 R26970 D79194 |
| 409126 | 110159_1 | AA063426 AW962323 AW408063 AA063503 AA772927 AW753492 BE175371 AA311147 |
| 409282 | 111512_1 | AW966480 AA069840 AA384646 |
| 409291 | 1115745_1 | AW373472 AW373484 BE071899 BE071898 |
| 409367 | 1123651_1 | AW382767 BE153835 BE153702 BE153572 |
| 409688 | 114831_3 | AI150485 AW938392 AA076894 AW883422 |
| 409692 | 114869_1 | AI500724 AA399661 AA397891 AI471084 AI423511 T07531 AI094336 |
| 409894 | 1157906_1 | BE081731 AW861738 AW503629 BE081969 |
| 410154 | 117950_1 | F06959 Z43559 AA082002 |
| 410357 | 1197159_1 | AW663614 BE046540 BE045760 AW827443 BE046544 |
| 410642 | 1213736_1 | AW792784 Z44444 H06639 |
| 410725 | 1218207_1 | AW799279 AW799395 AW799392 AW799276 AW799479 H57885 |
| 410730 | 121847_1 | AW368860 AA457091 AI903441 AA088823 W88852 AW979154 AA826016 R94779 |
| 410744 | 1219485_1 | H86002 W92289 AW801558 AW801324 AW801270 AW801307 AW801351 AW801357 AW801299 |
| | | AW801609 AW801356 AW801420 AW801425 AW801358 AW801429 AW801428 AW801427 AW801424 AW801306 |
| 410840 | 1223800_1 | AW806924 AW866537 AW866473 AW866298 AW866390 AW866478 AW866454 AW866309 AW866539 |
| | | AW866521 AW866547 AW866517 AW866403 AW866369 |
| 410956 | 1227882_1 | AW938322 AW938307 AW938320 AW938323 AW811840 |
| 411008 | 1229027_1 | AW813238 AW813474 AW813334 AW816081 AW813296 AW813363 AW813397 AW813327 AW813328 |
| | | AW816031 AW816140 |
| 411026 | 1229373_1 | AW813786 |
| 411141 | 1233793_1 | AW819561 AW819682 AW819563 AW819688 AW819499 AW819498 AW819690 BE065081 |
| 411184 | 1234977_1 | AW821117 AW855541 AW855405 AW855374 |
| 411188 | 1235093_1 | BE161168 BE162466 AW821260 |
| 411245 | 1236412_1 | AW833441 AW833552 AW833700 AW833610 AW833673 AW833675 |
| 411347 | 1239834_1 | AW838126 AW838294 AW838247 AW838251 AW838292 AW838299 AW838374 |
| 411432 | 1245636_1 | AW846272 AW846564 AW846545 AW846285 AW846135 AW846317 AW846200 AW846265 AW846326 |
| | | AW846196 AW846357 AW846153 AW846286 AW846319 AW846277 AW846381 AW846438 AW846481 AW846352 |
| 411496 | 1248073_1 | AW849241 AW849569 AW849243 |
| 411567 | 1249774_1 | AW851630 AW851703 AW851735 AW851723 AW851708 AW851712 |
| 411590 | 125064_1 | T96183 T64070 AA094134 |
| 411608 | 1251259_1 | AW853441 BE145228 BE145218 BE145162 BE145283 |
| 411652 | 1252836_1 | AW855393 AW855560 AW855424 |
| 411880 | 1263110_1 | AW872477 BE088101 T05990 |
| 411918 | 1265807_1 | AW876354 AW876179 AW876318 AW876290 AW876234 AW876125 AW876199 AW876198 |
| 411920 | 1265812_1 | AW876263 AW876257 AW876261 AW876273 AW876231 AW876398 AW876334 AW876134 AW876371 |
| | | AW876308 AW876314 AW876328 AW876169 AW876331 AW876426 AW876407 AW876412 AW876322 AW876363 |
| | | AW876218 AW876240 AW876141 AW876138 AW876326 AW876181 AW876131 AW876378 AW876206 AW876191 |
| | | AW876188 AW876376 AW876289 AW876415 AW876209 AW876366 AW876343 AW876347 AW876165 |
| 412085 | 1276467_1 | AW891667 H93096 |
| 412252 | 1285293_1 | AW903782 AW903668 AW903672 AW903763 AW903784 |
| 412274 | 128647_1 | AA101443 R20332 F07484 |
| 412298 | 1288098_1 | AW936300 AW936538 AW936386 |
| 412302 | 1288128_1 | AW936334 AW936371 AW936474 |
| 412679 | 1321229_1 | BE144762 AW979091 |
| 412902 | 1335166_1 | BE008018 BE008025 BE008026 BE007959 BE007994 BE008016 8E008019 BE008024 BE008022 |
| | | BE008027 BE008029 BE008020 BE008015 BE008021 BE008028 BE008023 BE008030 BE008014 |
| 413035 | 1346295_1 | BE155563 BE155574 BE155556 BE061294 |
| 413068 | 1348104_1 | BE063792 BE063803 BE063775 BE063801 BE063809 BE063777 BE063784 BE063808 BE066125 |
| | | BE063782 BE063805 BE063812 |
| 413196 | 135322_1 | AA127386 R15644 AA127404 |
| 413346 | 136323_1 | AA128586 AA463667 AA235203 |
| 413444 | 1370831_1 | BE141019 BE141473 BE141529 |
| 413489 | 1373392_1 | BE144228 BE144291 |
| 413593 | 137891_1 | AA205248 AA130658 AA204737 |
| 413645 | 138145_1 | AA130992 AA503835 AW969537 |
| 413656 | 1381628_1 | T91703 BE155222 BE155240 BE155274 BE155275 T92469 |
| 413750 | 1386250_1 | BE161453 W28808 |
| 413885 | 1397288_1 | BE177442 BE177439 BE177445 BE177440 BE177448 BE177444 BE177433 |
| 413888 | 139750_1 | AA580288 AA315655 AA133031 AA377748 |
| 414051 | 1413185_1 | BE244127 BE246216 |
| 414623 | 1466952_1 | BE391050 BE389191 BE389697 |
| 415054 | 151827_1 | AI733907 AA159708 AI732614 |
| 415110 | 1522905_1 | H04043 D60988 D60337 |
| 415157 | 1525616_1 | D63257 D78918 D63214 |
| 415361 | 1534970_1 | F06724 Z43690 R21681 |
| 415378 | 1535274_1 | T16964 F07075 H10256 |
| 415449 | 1537026_1 | H15034 T17195 F09069 |
| 415770 | 155437_1 | M79237 AI267298 AA169260 |
| 415806 | 155668_1 | AA169560 AA169840 |
| 415855 | 155930_1 | AI921875 AA170835 AA866613 |
| 415989 | 156454_1 | AI267700 AI720344 AA191424 AI023543 AI469633 AA172056 AW958465 AA172236 AW953397 AA355086 |
| 416311 | 158797_1 | D80529 D81719 C14833 AA179446 AA357794 |
| 416463 | 1595999_1 | H59241 H57540 R00795 |
| 417086 | 164830_1 | AA194446 AA194603 AA193162 AA196396 Z24810 |
| 417117 | 1651230_1 | N46778 W86339 N75221 |
| 417324 | 166714_1 | AW265494 AA455904 AA195677 AW265432 AW991605 AA456370 |
| 417527 | 168576_1 | AA203524 W88451 |
| 417670 | 1692163_1 | R07785 T85948 T86972 |
| 417882 | 1705458_1 | R22311 R23982 R23997 |
| 417890 | 1706141_1 | R79048 R23111 |
| 418056 | 171841_1 | AA524886 AW971347 AA211537 |
| 418797 | 179095_1 | AA515814 AA515037 AA230024 AA228343 |
| 418859 | 179717_1 | AA229558 AA345492 AA229582 |
| 419145 | 182217_1 | N99638 AW973750 AA328271 H90994 AA558020 AA234435 N59599 R94815 |
| 419386 | 184356_1 | AA236867 AA237066 AA354236 AW957759 H08961 |
| 419501 | 185354_1 | AW843822 AW844020 AA825923 AW968657 AW854173 BE084673 |
| 421338 | 201378_1 | AA287443 AA419385 BE084078 AI478347 |
| 421582 | 2041_1 | AI910275 X00474 X52003 X05030 NM_003225 AA314326 AA308400 AA506787 AA314825 |
| | | AI571948 AA507595 AA614579 AA587613 R83818 AA568312 AA614409 AA307578 AI925552 AW950155 |
| | | AI910083 M12075 BE074052 AW004668 AA578674 AA582084 BE074053 BE074126 BE074140 AA514776 |
| | | AA588034 BE074051 BE074068 AW009769 AW050690 AA858276 R55389 AI001051 AW050700 AW750216 |
| | | AA614539 BE074045 AI307407 AW602303 BE073575 AI202532 AA524242 AI970839 AI909751 BE076078 |
| | | AI909749 R55292 |
| 421718 | 20595_1 | AL117574 AI681945 BE503055 AW015330 C16652 AA441855 AA329853 AW962502 AA441830 AF114049 |
| 421926 | 209246_1 | AA300591 AW963893 AA300493 |
| 422259 | 214322_1 | AA307584 AW795791 AW795790 |
| 422297 | 214851_1 | AW961290 AA308338 R60841 BE378716 R13001 |
| 422337 | 215447_1 | R38572 R49597 H51730 F10468 AA309198 BE011889 AA613236 |
| 422444 | 216595_1 | AA310688 AA355321 AW962134 |
| 422857 | 222190_1 | R71461 AA328744 AA318128 BE081817 BE081587 BE081751 |
| 422936 | 223099_1 | AA319278 AA319712 AW961504 AW954956 |
| 422940 | 223106_1 | BE077458 AA337277 AA319285 |
| 422959 | 22327_3 | AV647015 AV647162 AA477047 AW392066 BE168052 AA657684 AL040747 AL043589 AL041618 |
| | | W24630 AA419002 AA778650 AI028269 AW378085 AW780241 AI984255 AW129462 AI271476 AL040967 AA836991 |
| | | AL040910 AW273346 AA132452 AI375545 AI436321 N53166 AA598667 AA423804 AA889495 AI954063 AI923968 |
| | | AW194576 AI400578 AA748499 AA860230 AW519209 AA339537 AA476935 AA767391 AI017695 AI860419 N93437 |
| | | AW452389 AI051533 AA806940 AA609569 AI624860 AI356952 AI811516 AI439198 AA749268 AI206880 AI784422 |
| | | AI431957 AI187038 AI678429 AI273421 AI358604 AI691155 AA586499 AA897667 AA524576 AI417772 AW799936 |
| | | BE241923 AA013428 BE164987 AW602710 AI933540 AA757772 AW015132 AI954159 AW956377 W69468 AI807580 |
| | | AI871746 AI922524 N80292 AI676213 BE467086 N92405 AV656311 AI678172 AW339455 AI949278 AI872882 |
| | | AI123785 AA016267 AI961623 AW168519 F28686 F37181 AA908333 AW020788 AW374027 |
| 423074 | 22470_1 | AL109963 AA134692 BE273642 M78295 AI825179 AA228029 BE538677 AW589948 |
| | | AW241564 AA732224 AA228030 AW977225 |
| 423622 | 230333_1 | BE154847 BE154890 AA328702 |
| 423736 | 231511_1 | AW936874 AW936923 AW936924 AA330274 |
| 423977 | 233868_1 | AA333232 AW962695 R54896 |
| 424060 | 23490_1 | X92108 AW295478 AI768675 AI086644 AW190160 AA313783 AA322741 AA354698 |
| | | AW962099 AL044667 AA282648 AA973897 AL036586 AA386055 AL135179 AW882199 |
| 424160 | 236151_1 | T74062 F12441 AA336207 BE185031 |
| 424290 | 237857_1 | AA338396 AW966247 AW753612 |
| 424951 | 245273_1 | AW964082 AA348838 AA348839 |
| 425288 | 249569_1 | AA354502 AA355215 AW962122 |
| 425303 | 249780_1 | AA354785 AA354792 AW958427 |
| 425702 | 255206_1 | N59555 AA362113 AA362136 |
| 425724 | 255509_1 | AA362525 AW979199 AA857501 |
| 425757 | 255956_1 | AA363171 AW963347 AA371863 |
| 425893 | 257742_1 | AA629695 AA365582 AA365581 AW959799 AW876559 AW876588 |
| 425980 | 258778_1 | AA366951 AA470999 AA469425 |
| 426123 | 261304_1 | AA370352 AA370860 AW962776 |
| 426477 | 267804_1 | AA379464 AA379611 AA379463 |
| 428036 | 28620_1 | AW068302 AI754558 AI750727 AI752631 AA302174 AA327522 M64110 AW859944 AW859989 AI751995 AA769620 |
| | | AI858829 AI924875 AI888836 AA864291 AI685060 AW088029 AI924908 AW466328 AI093800 AA991651 |
| | | AI254501 BE004703 AA334442 AW938852 AA194330 AL046953 AA852866 AW391995 W30846 AW662928 W25261 |
| | | AA042863 R99045 H97060 W03910 H94687 T88984 AL048165 T29632 N31556 N36484 AI798679 AA989355 W23832 |
| | | AA873789 AI743646 AA363587 AI814748 AW338990 N73740 N83666 AL047816 R24137 R63433 |
| | | AA524984 AA234043 AA195131 N99903 AA453669 AI240302 AA370271 AI950026 AW771049 AA121476 AA569557 |
| | | AI752632 AI355594 AI471993 AI159941 N94555 AI753138 N21537 H97881 N25769 AW068044 AA808425 R63380 |
| | | AA384736 AA384738 AA852352 AI073645 AA527960 AA525036 AA044414 AI752460 AA703064 R01216 AA897183 |
| | | AI751996 T81078 H95047 AA573642 D58348 N20953 AA437143 N95439 AA579540 AW867056 AA770090 AI085180 |
| | | AI806799 AA426421 AI572513 R24081 AA853189 AA295620 AA234044 AA371020 AW994984 H20896 AW964438 |
| | | AA318516 AA318499 AA318727 AA318211 AA318478 AA318444 AA318307 AA318497 AA318448 AA318309 |
| | | AA318496 AA318213 AA318435 AA318424 AA318217 AA318523 AA318438 AA318487 AA318724 AA593185 |
| | | AW994985 T69842 AI251813 AA478174 AA447737 T68350 F07712 AA121145 H08973 AA345212 BE000667 |
| | | AW068210 AW608407 R05674 H16712 N85426 N42354 H85516 BE147991 T28113 R32662 AA384678 AW239275 |
| | | H82382 AW840700 D58229 C04082 W45394 AW795667 R73973 BE002409 AA042828 AA363555 AJ223812 |
| | | AA344709 BE149590 R70995 W46881 W90778 N71242 AA534826 AL040676 R23797 H96450 |
| | | AA062957 D79947 W46960 AW959278 AA295997 AA026215 AW579469 AW365135 AW365134 AW994353 |
| | | AW972886 AW069166 AA343690 AW888731 AI751527 AA937490 AA937506 AI826715 BE465604 AI925532 |
| | | AI858109 AW339097 AI858524 AI720571 BE046506 AW384981 AA043908 AA375983 AA525181 AW068366 |
| | | AW070577 AW891837 N83985 AW182753 AI422979 AI679733 BE006555 AL048166 AI081401 AI888821 |
| | | AI626043 N37087 AI624140 AI801298 AA600048 AI753947 H89615 N66424 AW069756 AI814880 AI982806 |
| | | AI754287 AI971816 AW069022 AW069069 AW069454 AA342989 AI077712 AI311467 AI087361 AI801015 |
| | | W46993 AI281324 AW191963 AI421675 AI300881 AI356670 AA873156 AI004219 AI189685 AA478018 |
| | | AA076063 AI445222 AI753124 AI521569 AI925026 AI022368 AI475993 H20846 AI223234 AI635123 |
| | | AA579170 N30442 AW117889 AA807935 AA558975 AI306636 AA888963 AI952591 AI935835 AI445293 |
| | | H16713 AW139833 AA622122 AA972051 AI280828 H09543 AI453725 AW069613 AI865615 AI753921 |
| | | AI368782 AI633208 AI446651 W46961 N22201 H82276 C16555 AA291477 AW440535 AW517755 AA669921 |
| | | AI926777 AW662118 AA553369 N67873 AW023948 C15861 C16601 AI251465 AW079187 BE045090 AI273006 |
| | | C16390 C16503 AI620823 F13661 N66864 Z21311 C16108 C16089 C16400 AA758273 AI287781 AA864676 |
| | | AW608074 AW385583 AI589944 AA665817 AW192979 AW469065 AA564048 H84715 C16417 AA731072 AA661674 |
| | | C16487 N29477 AW189997 AI370492 C16471 AA652809 AA936687 AA506512 C16306 AW028413 AI537935 |
| | | AA528347 C16255 AW029046 C16202 AI868152 AI524662 T94414 AI567041 AI619654 AW008486 AI075624 |
| | | AA577434 AA345104 T30105 AA932002 C16585 AI750390 AW294265 AI619552 AA669781 AA026678 AW132002 |
| | | AW263919 C16562 AA759137 AA693351 Z40779 C16577 AA885045 AW073763 R45484 AI520895 U54708 T49285 |
| | | AI568126 AW006569 AI093317 AL119781 T61046 AI053563 H51958 AF114144 AA305739 AW950394 AW793928 |
| | | AW793910 AL047737 AV659047 AV659632 AI750389 AA092053 AA092798 H85367 T61597 R23745 Z20418 T78485 |
| | | AI751528 AW068121 AA853188 AI752459 AA853711 AW950663 R78964 R36359 R21626 R21522 |
| 428518 | 292383_1 | AW969656 AA501412 AA905186 AA429703 AA431958 |
| 429321 | 302955_1 | AA449921 AA449922 C75309 |
| 429468 | 30498_1 | AF033579 NM_005995 |
| 430068 | 312849_1 | AA464964 M85405 AA947566 |
| 430439 | 31808_1 | AL133561 AL041090 AL117481 AL122069 AW439292 AI968826 |
| 431089 | 327825_1 | BE041395 AA491826 AA621946 AA715980 AA666102 |
| 431322 | 331543_1 | AW970622 AA503009 AA502998 AA502989 AA502805 T92188 |
| 431926 | 339082_1 | AW972724 AA522631 AA877998 |
| 432222 | 343347_1 | AI204995 AW827539 AW969908 AW440776 AA528756 |
| 432407 | 34624_1 | AA221036 R87170 BE537068 BE544757 C18935 AW812058 T92565 |
| | | AA227415 AA233942 AA223237 AA668403 AA601627 AW869639 BE061833 BE000620 AW961170 AW847519 |
| | | AA308542 AW821833 AW945688 C04699 AA205504 AA377241 AW821667 AA055720 AW817981 AW856468 |
| | | AA155719 AA179928 T03007 AW754298 AA227407 AA113928 AA307904 C16859 |
| 432586 | 350432_1 | AA568548 AI050036 AA554053 AI911659 AI826259 |
| 433010 | 357372_1 | AW970018 AA573669 AA573622 R08736 |
| 433436 | 366107_1 | AW162474 AA588442 AI972440 |
| 434414 | 38585_1 | AI798376 S46400 AW811617 AW811616 W00557 BE142245 AW858232 AW861851 |
| | | AW858362 AA232351 AA218567 AA055556 AW858231 AW857541 AW814172 H66214 AW814398 AF134164 |
| | | AA243093 AA173345 AA199942 AA223384 AA227092 AA227080 T12379 AA092174 T61139 AA149776 |
| | | AA699829 AW879188 AW813567 AW813538 AI267168 AA157718 AA157719 AA100472 AA100774 AA130756 |
| | | AA157705 AA157730 AA157715 AA053524 AW849581 AW854566 C05254 AW882836 T92637 AW812621 AA206583 |
| | | AA209204 BE156909 AA226824 AI829309 AW991957 N66951 AA527374 H66215 AA045564 AI694265 H60808 |
| | | AA149726 AW195620 BE081333 BE073424 AW817662 AW817705 AW817703 AW817659 BE081531 H59570 |
| 434830 | 39406_1 | AW852235 AF156166 R07008 |
| 435073 | 399701_1 | AA664078 AW363313 AA805009 |
| 436608 | 42361_3 | AA628980 AI126603 BE504035 |
| 437046 | 43210_1 | BE149154 BE149151 X60138 |
| 437272 | 435447_1 | AW975957 AA747943 AA811289 |
| 437908 | 445001_1 | AI082424 AI740586 AA771764 AA771806 AI033879 BE500996 AW204531 D38676 |
| 438089 | 44963_1 | W05391 X56197 H75313 AW770789 AA281642 AV654440 AA344646 R00244 T83378 |
| 438091 | 44964_1 | AW373062 T55662 AI299190 BE174210 AW579001 H01811 W40186 R67100 AI923886 AW952164 AA628440 |
| | | AW898607 AW898616 AA709126 AW898628 AW898544 AA947932 AW898625 AW898622 AI276125 AI185720 |
| | | AW510698 AA987230 T52522 BE467708 AW243400 AW043642 AI288245 AI186932 D52654 D55017 D52715 |
| | | D52477 D53933 D54679 AI298739 AI146984 AI922204 N98343 BE174213 AA845571 AI813854 AI214518 |
| | | AI635262 AI139455 AI707807 AI698085 AW884528 AI024768 AI004723 AW087420 AI565133 N94964 AI268939 |
| | | AW513280 AI061126 AI435818 AI859106 AI360506 AI024767 AA513019 AA757598 X56196 AA902959 AI334784 |
| | | AI860794 AA010207 AW890091 AW513771 AI951391 AI337671 T52499 AA890205 AI640908 H75966 AA463487 |
| | | AA358688 AI961767 AI866295 AA780994 AI985913 BE174196 AA029094 AW592159 T55581 N79072 AI611201 |
| | | AA910812 AI220713 AW149306 AI758412 AA045713 R79750 N76096 |
| 438535 | 45946_1 | L09078 L03145 L09094 L09098 L03165 L09102 |
| 438813 | 46553_1 | M27346 |
| 439590 | 47413_1 | AF086410 W94386 W74609 |
| 439848 | 477806_1 | AW979249 D63277 AA846968 |
| 440612 | 49847_1 | BE561384 AW732707 |
| 440642 | 499098_1 | AI744995 AI973099 R19291 AA935215 AA897534 AI698070 BE179102 AI694912 |
| 441846 | 527227_1 | AW850980 AA969613 AW366793 |
| 443100 | 559752_1 | AI033188 BE004743 AW804074 BE004795 BE178660 BE089438 BE089378 BE089439 |
| | | BE089437 BE089423 BE089420 BE089425 BE089424 BE089426 |
| 443197 | 56261_1 | Z43613 AA320191 AW954963 H15889 R83872 |
| 443357 | 567506_1 | AW016773 AI052778 AI452937 AW085293 |
| 444163 | 593658_1 | AI126098 AI184746 AI148521 |
| 444298 | 600160_1 | Z17870 AL039867 AI139927 |
| 444312 | 600647_1 | R44007 N54521 AI140476 AW418649 T95308 |
| 444872 | 623948_1 | AI936264 AI219228 AI200740 BE300771 AI635739 AI690626 AW044010 R60842 R40388 |
| 445468 | 640681_1 | AW450439 AW297340 AI239849 AI613119 |
| 445555 | 64334_1 | AW974013 AA557257 N36812 AI597998 AA873565 |
| 445689 | 647829_1 | BE158869 AI248241 BE158865 BE158868 |
| 446780 | 692897_1 | R31107 AI341136 AI653198 H04953 |
| 447008 | 70358_1 | BE010189 AW879041 BE008038 AW905325 AA343575 AW844209 AL038020 BE010133 BE010083 |
| | | AW903901 BE174377 AI309717 AI349651 AI903726 BE176661 AW905394 |
| 448489 | 765247_1 | AI523875 R45782 R45781 |
| 450717 | 844561_1 | T94709 AI820675 AI732253 |
| 450724 | 844585_1 | R55428 AI820704 AI732283 R54983 |
| 450735 | 844617_1 | AI732321 R55640 R55639 AI820744 |
| 451724 | 882130_1 | AI903765 AI811194 BE007147 AW130760 |
| 452565 | 922372_1 | BE066552 BE066341 AI907683 |
| 453577 | 972216_1 | AL043049 T95976 |
| 453823 | 982526_1 | AL137967 BE064160 BE064186 |
| 453826 | 982669_1 | AL138129 AL138179 BE064231 |
| 454457 | 1207274_1 | AW753456 AW753036 AW854868 AW854862 |
| 454523 | 1221564_1 | AW803980 AW803974 |
| 454609 | 1226517_1 | AW810204 AW810555 AW810196 AW810619 AW810507 |
| 454629 | 1227240_1 | AW811114 AW811095 AW811087 AW811124 AW811054 AW811094 AW811157 |
| 454631 | 1227443_1 | AW811324 AW811325 AW811326 AW811333 AW811329 AW811328 AW811332 AW811339 AW811335 |
| 454639 | 1227728_1 | AW811633 AW811652 AW811898 |
| 454662 | 1228537_1 | AW812715 AW812646 AW812714 |
| 454701 | 1229702_1 | AW854930 AW814431 AW814190 AW814115 AW854941 |
| 454721 | 1230747_1 | AW815588 AW815671 AW815493 AW815898 AW815613 AW815490 AW815808 AW815426 |
| 454741 | 1232559_1 | BE154396 AW817959 BE154393 |
| 454826 | 1236377_1 | AW833676 AW833814 AW833798 AW833677 AW833449 AW833630 AW833626 AW833444 AW833366 |
| | | AW833791 AW833659 AW833432 AW833534 AW833556 AW833553 |
| 454915 | 1242343_1 | AW841619 AW851958 AW851851 AW851985 |
| 455065 | 1251980_1 | AW854352 AW854311 AW854340 AW854461 |
| 455087 | 1252832_1 | AW855389 AW855556 AW855420 |
| 455116 | 1254206_1 | AW857271 AW857308 AW857296 AW857258 |
| 455236 | 1265662_1 | AW875972 AW875983 AW875974 AW876000 AW875966 AW876050 |
| 455300 | 1276482_1 | AW891707 AW891696 AW891917 AW891913 AW891912 AW891909 AW891890 AW891892 AW891889 |
| | | AW891697 AW891880 AW891898 |
| 455407 | 1288347_1 | AW936813 AW936731 AW936728 AW936600 AW936681 AW936651 |
| 455508 | 1318507_1 | AW976165 C04000 |
| 455527 | 1322125_1 | AW984479 AW984498 AW984495 AW984477 AW984480 AW984504 |
| 455642 | 1348163_1 | BE063965 BE063968 BE064034 BE064028 BE063874 BE063966 BE063869 BE064043 BE064033 BE063884 |
| 455649 | 1348708_1 | BE065051 BE155165 BE064764 BE155231 BE064648 BE064671 BE064636 |
| 455753 | 1356070_1 | BE075124 BE075229 BE075278 |
| 455757 | 1358657_1 | BE079531 BE079371 BE079372 BE079593 BE079468 BE079504 BE079505 |
| 455908 | 1382301_1 | BE156306 BE156188 BE156298 BE156377 BE156374 |
| 455917 | 1382784_1 | BE156765 BE156770 BE156767 BE156769 BE156803 BE156802 BE156847 BE156853 BE156780 BE156836 |
| | | BE156792 BE156834 BE156779 BE156789 BE156833 BE156844 BE156831 BE156849 BE156797 |
| | | BE156784 BE156801 BE156843 BE156793 BE156852 |
| 455988 | 1397740_1 | BE177983 BE178322 |
| 456034 | 142696_1 | AW450979 AA136653 AA136656 AW419381 AA984358 AA492073 BE168945 AA809054 AW238038 BE011212 |
| | | BE011359 BE011367 BE011368 BE011362 BE011215 BE011365 BE011363 |
| 456172 | 1603643_1 | R99050 R99067 H67642 |
| 456332 | 179104_1 | AA228357 AW841786 AW841716 |
| 456381 | 184123_1 | AA236606 AA459341 AA237079 |
| 457297 | 313764_1 | AW968188 AA468196 AA468269 AA468298 |
| 457389 | 331080_1 | AW970989 AA502167 AA507546 |
| 457567 | 357346_1 | AW939074 AW939073 BE160476 AW939938 AW939206 AW940012 AW939076 AA573577 AW750479 AA574383 |
| | | AW970057 |
| 457581 | 359936_1 | AA578512 AA595535 BE177533 |
| 457741 | 395767_1 | BE044740 AW827360 AW827623 BE161439 BE044718 BE046207 BE046551 AA653908 BE166581 |
| 457871 | 426637_1 | AI168278 AA868238 BE550792 AI522194 AI819707 AA973538 AI990086 AI628424 AI095270 AI991608 AA730741 |
| 457951 | 44251_1 | U23860 U80739 |
| 459234 | 945240_−1 | AI940425 |

Pkey: Unique Eos probeset identifier number
CAT number: Gene cluster number
Accession: Genbank accession numbers

[0384] TABLE 8C

| Pkey | Ref | Strand | Nt_position |
|---|---|---|---|
| 400704 | 8118864 | Minus | 63110-63241 |
| 400830 | 8570385 | Plus | 157683-163035 |
| 400834 | 8705192 | Plus | 121963-122288 |
| 400840 | 9188586 | Plus | 113882-114121 |
| 400850 | 1927150 | Minus | 4506-4691 |
| 400881 | 2842777 | Minus | 91446-91603, 92123-92265 |
| 401016 | 8117441 | Plus | 126234-126359, 128050-128236 |
| 401090 | 8492704 | Minus | 201281-201460 |
| 401215 | 9858408 | Plus | 103739-103919 |
| 401241 | 4827300 | Minus | 30503-30844, 31056-31248 |
| 401335 | 9884881 | Plus | 15736-16352 |
| 401381 | 8570226 | Minus | 118629-119146, 119392-119657 |
| 401400 | 7708226 | Minus | 33028-33585 |
| 401469 | 6682292 | Minus | 125521-125639 |
| 401473 | 7249001 | Plus | 115142-117305 |
| 401577 | 9280797 | Minus | 139377-139674, 141195-141281, 142217-142340 |
| 401658 | 9100664 | Plus | 89638-90028 |
| 401659 | 7689875 | Minus | 183379-183521 |
| 401686 | 6468551 | Plus | 5005-5426, 6810-7042 |
| 401723 | 7656694 | Plus | 147273-147503 |
| 401814 | 7408052 | Plus | 136003-136726 |
| 401818 | 7467933 | Minus | 10964-11084, 11674-11817 |
| 401890 | 8516144 | Plus | 148955-149396, 149569-150002 |
| 401908 | 8698760 | Minus | 126888-127024 |
| 401913 | 9369520 | Minus | 33753-33904 |
| 401927 | 3873185 | Minus | 112000-112137 |
| 402025 | 7547159 | Plus | 173835-173998 |
| 402039 | 7770432 | Plus | 560-1294 |
| 402049 | 8072512 | Plus | 100065-100419 |
| 402085 | 7249154 | Plus | 90533-90687, 94949-95158 |
| 402241 | 7690131 | Minus | 125073-125206, 130996-131125 |
| 402294 | 2282012 | Minus | 2575-3000 |
| 402305 | 7328724 | Plus | 40832-41362 |
| 402366 | 9454515 | Plus | 195808-196863 |
| 402551 | 9856793 | Minus | 37346-37633 |
| 402654 | 8076879 | Plus | 44058-44803 |
| 402685 | 8318556 | Plus | 58962-59294 |
| 402762 | 9230904 | Minus | 123298-124035 |
| 402797 | 3421043 | Minus | 15758-15930 |
| 402833 | 8918545 | Plus | 26987-27778 |
| 402901 | 8894222 | Minus | 175426-175667 |
| 402948 | 9368458 | Minus | 143456-143626, 143808-143935 |
| 403066 | 8954202 | Plus | 158189-158433 |
| 403072 | 8954241 | Plus | 141829-142006 |
| 403146 | 9799812 | Plus | 162877-163118 |
| 403197 | 9930749 | Plus | 79990-80237 |
| 403214 | 7630945 | Minus | 76723-77027, 79317-79484 |
| 403217 | 7630969 | Plus | 54089-54163, 55427-55623 |
| 403290 | 8083176 | Plus | 19288-20076 |
| 403291 | 7230870 | Plus | 95177-95435 |
| 403294 | 8096496 | Plus | 41565-41881 |
| 403315 | 8247953 | Minus | 125117-125287 |
| 403332 | 8568139 | Minus | 31409-31674 |
| 403344 | 8569726 | Plus | 70823-70990 |
| 403362 | 8571772 | Plus | 64099-64260 |
| 403371 | 9087278 | Plus | 105655-106050 |
| 403391 | 9438337 | Plus | 42410-42544, 83317-83540, 86840-86922, 87970-88110 |
| 403488 | 9966615 | Minus | 12450-12753 |
| 403536 | 8076924 | Plus | 34972-35182 |
| 403779 | 8018040 | Minus | 95602-95969 |
| 403859 | 7708954 | Plus | 113738-113858 |
| 403871 | 7709262 | Plus | 104545-104757 |
| 403903 | 7710671 | Minus | 101165-102597 |
| 403917 | 7710849 | Plus | 109718-109847, 109927-110202 |
| 403978 | 8576014 | Plus | 97326-97808 |
| 404031 | 7671252 | Plus | 171477-172316 |
| 404167 | 9926594 | Minus | 77030-77280 |
| 404220 | 6706820 | Plus | 46107-46439 |
| 404286 | 2326514 | Plus | 51086-51301 |
| 404418 | 7382420 | Minus | 153339-153481, 155099-155294 |
| 404427 | 7407959 | Plus | 127170-127358 |
| 404429 | 7407979 | Plus | 31352-31498 |
| 404440 | 7528051 | Plus | 80430-81581 |
| 404495 | 8151634 | Minus | 59449-60477 |
| 404580 | 6539738 | Minus | 240588-241589 |
| 404606 | 9212936 | Minus | 22310-23269 |
| 404730 | 8389582 | Plus | 119832-120016, 124110-124275 |
| 404917 | 7341851 | Plus | 49330-49498 |
| 405033 | 7107731 | Minus | 142358-142546 |
| 405137 | 8570507 | Plus | 158969-159423 |
| 405146 | 9438278 | Minus | 102529-102633 |
| 405158 | 9966252 | Plus | 42873-43056, 43815-43949 |
| 405187 | 7229826 | Plus | 117025-117170, 118567-118736 |
| 405223 | 7239614 | Plus | 106184-106313 |
| 405340 | 6094635 | Plus | 49644-49760 |
| 405494 | 8050952 | Minus | 70284-70518 |
| 405551 | 1552506 | Plus | 12525-12997 |
| 405654 | 4895155 | Minus | 53624-53759 |
| 405667 | 4726099 | Plus | 5798-5914 |
| 405673 | 4589984 | Plus | 50700-50842 |
| 405704 | 4204244 | Plus | 138842-139051 |
| 405723 | 9801668 | Plus | 114896-115831 |
| 405727 | 9838331 | Minus | 78865-79664 |
| 405760 | 6066938 | Minus | 37424-38045 |
| 405779 | 7280331 | Minus | 33048-33856 |
| 405944 | 7883702 | Minus | 5143-5684 |
| 406002 | 8247797 | Minus | 154007-154579 |
| 406016 | 8272661 | Plus | 41341-41940 |
| 406097 | 7107918 | Minus | 36698-37269 |
| 406104 | 9124028 | Plus | 35309-35977 |
| 406156 | 7144867 | Plus | 379-597 |
| 406207 | 5923650 | Minus | 162607-162800 |
| 406300 | 6479046 | Minus | 19234-19401 |
| 406308 | 9211532 | Plus | 358408-358651 |
| 406314 | 9211609 | Minus | 12899-13011, 18022-18136 |
| 406317 | 9211652 | Plus | 108018-108410 |
| 406432 | 9256504 | Plus | 3804-3930, 4026-4120, 4929-5109 |
| 406490 | 7711309 | Minus | 80295-80480 |
| 406584 | 3983530 | Minus | 3989-4497 |

Pkey: Unique number corresponding to an Eos probeset
Ref: Sequence source. The 7 digit numbers in this column are Genbank Identifier (GI) numbers. “Dunham I. et al.” refers to the publication entitled “The DNA sequence of human chromosome 22.” Dunham I. et al., Nature (1999) 402: 489-495.
Strand: Indicates DNA strand from which exons were predicted.
Nt_position: Indicates nucleotide positions of predicted exons.

[0385] TABLE 9A
Genes predictive of no bladder cancer progression

| Pkey | ExAccn | UnigeneID | Unigene Title | R1 | R2 |
|---|---|---|---|---|---|
| 408000 | L11690 | Hs.198689 | bullous pemphigoid antigen 1 (230/240 kD) | 4.64 | 5.88 |
| 412129 | M21984 | Hs.73454 | troponin T3, skeletal, fast | 4.54 | 5.10 |
| 459290 | NM_001546 | Hs.34853 | inhibitor of DNA binding 4, dominant neg | 4.37 | 1.63 |
| 400844 | | | NM_003105*: Homo sapiens sortilin-related | 3.69 | 5.90 |
| 419555 | AA244416 | | gb: nc07d11.s1 NCI_CGAP_Pr1 Homo sapiens | 3.61 | 2.03 |
| 414522 | AW518944 | Hs.76325 | step II splicing factor SLU7 | 3.60 | 1.00 |
| 440509 | BE410132 | Hs.134202 | ESTs, Weakly similar to T17279 hypotheti | 3.58 | 1.04 |
| 445182 | AW189787 | | ESTs | 3.57 | 2.70 |
| 407151 | H25836 | Hs.301527 | ESTs, Moderately similar to unknown [H. s | 3.56 | 1.48 |
| 421314 | BE440002 | Hs.180324 | Homo sapiens, clone IMAGE: 4183312, mRNA, | 3.28 | 3.25 |
| 429663 | M68874 | Hs.211587 | phospholipase A2, group IVA (cytosolic, | 3.25 | 2.50 |
| 430702 | U56979 | Hs.278568 | H factor 1 (complement) | 3.20 | 2.70 |
| 412420 | AL035668 | Hs.73853 | bone morphogenetic protein 2 | 3.20 | 2.30 |
| 420729 | AW964897 | Hs.290825 | ESTs | 3.20 | 1.53 |
| 433376 | AI249361 | Hs.74122 | caspase 4, apoptosis-related cysteine pr | 3.00 | 4.10 |
| 420028 | AB014680 | Hs.8786 | carbohydrate (N-acetylglucosamine-6-O) s | 2.94 | 2.78 |
| 407881 | AW072003 | Hs.40968 | heparan sulfate (glucosamine) 3-O-sulfot | 2.93 | 1.43 |
| 426283 | NM_003937 | Hs.169139 | kynureninase (L-kynurenine hydrolase) | 2.93 | 1.33 |
| 428030 | AI915228 | Hs.11493 | Homo sapiens cDNA FLJ13536 fis, clone PL | 2.92 | 2.47 |
| 419713 | AW968058 | Hs.92381 | nudix (nucleoside diphosphate linked moi | 2.89 | 3.33 |
| 414407 | AA147026 | Hs.76704 | ESTs | 2.87 | 2.87 |
| 450779 | AW204145 | Hs.156044 | ESTs | 2.78 | 1.86 |
| 411243 | AB039886 | Hs.69319 | CA11 | 2.73 | 1.00 |
| 417878 | U90916 | Hs.82845 | Homo sapiens cDNA: FLJ21930 fis, clone H | 2.68 | 2.32 |
| 441619 | NM_014056 | Hs.7917 | DKFZP564K247 protein | 2.67 | 2.98 |
| 446619 | AU076643 | Hs.313 | secreted phosphoprotein 1 (osteopontin, | 2.66 | 1.00 |
| 440006 | AK000517 | Hs.6844 | hypothetical protein FLJ20510 | 2.64 | 1.77 |
| 426252 | BE176980 | Hs.28917 | ESTs | 2.63 | 7.30 |
| 424008 | R02740 | Hs.137555 | putative chemokine receptor; GTP-binding | 2.60 | 2.53 |
| 429429 | AA829725 | Hs.334437 | hypothetical protein MGC4248 | 2.59 | 3.34 |
| 427450 | AB014526 | Hs.178121 | KIAA0626 gene product | 2.57 | 2.28 |
| 420180 | AI004035 | Hs.25191 | ESTs | 2.56 | 1.68 |
| 434061 | AW024973 | Hs.283675 | NPD009 protein | 2.54 | 2.10 |
| 422070 | AF149785 | Hs.111126 | pituitary tumor-transforming 1 interacti | 2.54 | 3.25 |
| 419355 | AA428520 | Hs.90061 | progesterone binding protein | 2.53 | 3.63 |
| 446215 | AW821329 | Hs.14368 | SH3 domain binding glutamic acid-rich pr | 2.52 | 4.38 |
| 432442 | AI672516 | Hs.178485 | ESTs, Weakly similar to S65657 alpha-1C- | 2.50 | 4.60 |
| 447887 | AA114050 | Hs.19949 | caspase 8, apoptosis-related cysteine pr | 2.49 | 2.23 |
| 401155 | | | Target Exon | 2.48 | 2.30 |
| 404530 | | | Target Exon | 2.48 | 1.00 |
| 446006 | NM_004403 | Hs.13530 | deafness, autosomal dominant 5 | 2.48 | 2.35 |
| 436476 | AA326108 | Hs.33829 | bHLH protein DEC2 | 2.47 | 2.88 |
| 446535 | AF257175 | Hs.15250 | peroxisomal D3, D2-enoyl-CoA isomerase | 2.46 | 2.19 |
| 408636 | BE294925 | Hs.46680 | CGI-12 protein | 2.45 | 1.60 |
| 420962 | NM_005904 | Hs.100602 | MAD (mothers against decapentaplegic, Dr | 2.44 | 3.75 |
| 427008 | Z45258 | Hs.286013 | short coiled-coil protein | 2.42 | 3.40 |
| 459711 | BE386801 | Hs.21858 | trinucleotide repeat containing 3 | 2.40 | 2.78 |
| 407910 | AA650274 | Hs.41296 | fibronectin leucine rich transmembrane p | 2.40 | 1.00 |
| 410337 | M83822 | Hs.62354 | cell division cycle 4-like | 2.39 | 3.88 |
| 435029 | AF167706 | Hs.19280 | cysteine-rich motor neuron 1 | 2.39 | 3.23 |
| 437181 | AI306615 | Hs.125343 | ESTs, Weakly similar to KIAA0758 protein | 2.39 | 1.00 |
| 410968 | AA199907 | Hs.67397 | homeo bus A1 | 2.38 | 1.33 |
| 422511 | AU076442 | Hs.117938 | collagen, type XVII, alpha 1 | 2.38 | 6.40 |
| 450775 | AA902384 | Hs.73853 | bone morphogenetic protein 2 | 2.38 | 2.71 |
| 442433 | BE243044 | Hs.8309 | KIAA0747 protein | 2.37 | 3.68 |
| 454000 | AA040620 | Hs.5672 | hypothetical protein AF140225 | 2.36 | 1.14 |
| 447701 | BE619526 | Hs.255527 | hypothetical protein MGC14128 | 2.36 | 2.02 |
| 427985 | AI770170 | Hs.29643 | Homo sapiens cDNA FLJ13103 fis, clone NT | 2.36 | 2.18 |
| 442257 | AW503831 | Hs.323370 | Human EST clone 25267 mariner transposon | 2.35 | 3.53 |
| 454070 | N79110 | Hs.21276 | collagen, type IV, alpha 3 (Goodpasture | 2.35 | 3.60 |
| 418452 | BE379749 | Hs.85201 | C-type (calcium dependent, carbohydrate- | 2.35 | 2.48 |
| 421218 | NM_000499 | Hs.72912 | cytochrome P450, subfamily I (aromatic c | 2.35 | 1.00 |
| 407793 | AW080879 | Hs.236572 | gb: xc38g04.x1 NCI_CGAP_Co20 Homo sapiens | 2.35 | 1.21 |
| 442061 | AA774284 | Hs.285728 | abl-interactor 12 (SH3-containing protei | 2.34 | 3.03 |
| 402845 | | | ENSP00000246267: KIAA0444 PROTEIN (FRAGME | 2.34 | 1.52 |
| 411407 | R00903 | Hs.169793 | ribosomal protein L32 | 2.34 | 0.77 |
| 418506 | AA084248 | Hs.85339 | G protein-coupled receptor 39 | 2.34 | 0.72 |
| 424637 | NM_015057 | Hs.151411 | KIAA0916 protein | 2.32 | 2.55 |
| 413804 | T64682 | | gb: yc48b02.r1 Stratagene liver (937224) | 2.32 | 1.46 |
| 411060 | NM_006074 | Hs.318501 | Homo sapiens mRNA full length insert cDN | 2.32 | 2.90 |
| 430028 | BE564110 | Hs.227750 | Target CAT | 2.32 | 2.28 |
| 417720 | AA205625 | Hs.208067 | ESTs | 2.32 | 2.09 |
| 436396 | AI683487 | Hs.152213 | wingless-type MMTV integration site fami | 2.31 | 1.13 |
| 454219 | X75042 | Hs.44313 | v-rel avian reticuloendotheliosis viral | 2.30 | 4.38 |
| 444745 | AF117754 | Hs.11861 | thyroid hormone receptor-associated prot | 2.30 | 1.86 |
| 408179 | AL042465 | Hs.43445 | poly(A)-specific ribonuclease (deadenyla | 2.29 | 2.19 |
| 442679 | R53718 | Hs.107882 | hypothetical protein FLJ10659 | 2.29 | 2.79 |
| 458949 | AW291777 | Hs.346137 | ESTs, Weakly similar to T08599 probable | 2.28 | 1.85 |
| 407191 | AA608751 | | gb: ae56h07.s1 Stratagene lung carcinoma | 2.27 | 2.42 |
| 448367 | AI955411 | Hs.94109 | Homo sapiens cDNA FLJ13634 fis, clone PL | 2.27 | 1.18 |
| 405155 | | | Target Exon | 2.26 | 1.94 |
| 445594 | AW058463 | Hs.12940 | zinc-fingers and homeoboxes 1 | 2.26 | 1.55 |
| 417458 | NM_005655 | Hs.82173 | TGFB inducible early growth response | 2.25 | 1.95 |
| 430315 | NM_004293 | Hs.239147 | guanine deaminase | 2.24 | 1.84 |
| 411945 | AL033527 | Hs.92137 | v-myc avian myelocytomatosis viral oncog | 2.24 | 2.73 |
| 408937 | AA210734 | Hs.291386 | ESTs | 2.24 | 3.18 |
| 431474 | AL133990 | Hs.190642 | CEGP1 protein | 2.23 | 1.00 |
| 434094 | AA305599 | Hs.238205 | hypothetical protein PRO2013 | 2.22 | 4.08 |
| 420997 | AK001214 | Hs.100914 | hypothetical protein FLJ10352 | 2.22 | 2.15 |
| 420164 | AW339037 | Hs.24908 | ESTs | 2.22 | 2.16 |
| 414099 | U11313 | Hs.75760 | sterol carrier protein 2 | 2.21 | 4.05 |
| 424800 | AL035588 | Hs.153203 | MyoD family inhibitor | 2.21 | 3.53 |
| 459005 | AA447679 | Hs.144558 | ESTs, Weakly similar to ALU1_HUMAN ALU S | 2.21 | 2.90 |
| 416290 | NM_000016 | Hs.79158 | acyl-Coenzyme A dehydrogenase, C-4 to C- | 2.20 | 4.00 |
| 439208 | AK000299 | Hs.180952 | dynactin 4(p62) | 2.20 | 1.88 |
| 401563 | | | C15001262: gi\|7304981\|ref\|NP_038528.1\| ca | 2.20 | 1.77 |
| 404687 | | | C9000375*: gi\|11994617\|dbj\|BAB02754.1\| (A | 2.19 | 2.60 |
| 443303 | U67319 | Hs.9216 | caspase 7, apoptosis-related cysteine pr | 2.19 | 2.08 |
| 439866 | AA280717 | Hs.6727 | Ras-GTPase activating protein SH3 domain | 2.19 | 2.21 |
| 400835 | AW853954 | | chromosome 2 open reading frame 2 | 2.18 | 3.00 |
| 456855 | AF035528 | Hs.153863 | MAD (mothers against decapentaplegic, Dr | 2.18 | 2.45 |
| 431689 | AA305688 | Hs.267695 | UDP-Gal: betaGlcNAc beta 1,3-galactosyltr | 2.17 | 1.83 |
| 418026 | BE379727 | Hs.83213 | fatty acid binding protein 4, adipocyte | 2.17 | 2.67 |
| 451131 | AI267586 | Hs.268012 | fatty-acid-Coenzyme A ligase, long-chain | 2.17 | 1.71 |
| 408038 | Y14443 | | zinc finger protein 200 | 2.17 | 1.71 |
| 434078 | AW880709 | Hs.283683 | chromosome 8 open reading frame 4 | 2.17 | 1.00 |
| 441623 | AA315805 | | desmoglein 2 | 2.17 | 1.81 |
| 459244 | AW503990 | Hs.142442 | HP1-BP74 | 2.17 | 4.03 |
| 424720 | M89907 | Hs.152292 | SWI/SNF related, matrix associated, acti | 2.17 | 2.93 |
| 404204 | | | ENSP00000252204*: Zinc finger protein 165 | 2.17 | 1.02 |
| 453987 | AA323750 | Hs.235026 | Homo sapiens, clone IMAGE: 4247529, mRNA, | 2.16 | 2.85 |
| 411400 | AA311919 | Hs.69851 | nucleolar protein family A, member 1 (H/ | 2.16 | 3.60 |
| 454949 | AW847318 | Hs.290131 | KIAA1819 protein | 2.16 | 1.96 |
| 409223 | AA312572 | Hs.6241 | phosphoinositide-3-kinase, regulatory su | 2.16 | 1.48 |
| 418030 | BE207573 | Hs.83321 | neuromedin B | 2.16 | 2.07 |
| 433364 | AI075407 | Hs.296083 | ESTs, Moderately similar to I54374 gene | 2.16 | 2.32 |
| 459511 | AI142379 | | gb: qg64c01.r1 Soares_testis_NHT Homo sap | 2.16 | 1.85 |
| 437559 | AI678033 | Hs.121476 | ESTs | 2.15 | 1.43 |
| 418827 | BE327311 | Hs.47166 | HT021 | 2.15 | 3.84 |
| 417470 | AF112219 | Hs.82193 | esterase D/formylglutathione hydrolase | 2.15 | 1.74 |
| 421012 | X53281 | Hs.101025 | basic transcription factor 3 | 2.15 | 1.26 |
| 448772 | AW390822 | Hs.301528 | L-kynurenine/alpha-aminoadipate aminotra | 2.15 | 4.05 |
| 439601 | AB029032 | Hs.6606 | KIAA1109 protein | 2.15 | 2.15 |
| 434417 | AL110157 | Hs.3843 | Home sapiens mRNA; cDNA DKFZp586F2224 (f | 2.15 | 1.45 |
| 424865 | AF011333 | Hs.153563 | lymphocyte antigen 75 | 2.15 | 2.63 |
| 400752 | | | NM_003105*: Homo sapiens sortilin-related | 2.14 | 2.67 |
| 438916 | AW188464 | Hs.101515 | ESTs | 2.14 | 2.38 |
| 430024 | AI808780 | Hs.227730 | integrin, alpha 6 | 2.14 | 2.00 |
| 409345 | AI949109 | | hypothetical protein FLJ20783 | 2.14 | 1.40 |
| 421939 | BE169531 | Hs.109727 | TAK1-binding protein 2; KIAA0733 protein | 2.13 | 1.58 |
| 442315 | AA173992 | Hs.7956 | ESTs, Moderately similar to ZN91_HUMAN Z | 2.13 | 2.67 |
| 419591 | AF090900 | Hs.91393 | Homo sapiens cDNA: FUJ21887 fis, clone H | 2.13 | 2.00 |
| 458025 | AI275406 | Hs.32450 | gb: qI63c10.x1 Soares_NhHMPu_S1 Homo sapi | 2.12 | 0.89 |
| 428582 | BE336699 | Hs.185055 | BENE protein | 2.12 | 2.65 |
| 422749 | W01076 | Hs.278573 | CD59 antigen p18-20 (antigen identified | 2.12 | 2.73 |
| 433091 | Y12642 | Hs.3185 | lymphocyte antigen 6 complex, locus D | 2.11 | 0.91 |
| 456421 | AL157485 | Hs.91973 | hypothetical protein | 2.11 | 2.51 |
| 421508 | NM_004833 | Hs.105115 | absent in melanoma 2 | 2.11 | 3.13 |
| 402760 | | | NM_021797*: Homo sapiens eosinophil chemo | 2.09 | 1.79 |
| 406274 | | | Target Exon | 2.09 | 1.60 |
| 406897 | M57417 | | gb: Home sapiens mucin (mucin) mRNA, part | 2.09 | 1.00 |
| 409632 | W74001 | Hs.55279 | serine (or cysteine) proteinase inhibito | 2.09 | 2.92 |
| 445320 | AA503887 | Hs.167011 | Home sapiens cDNA: FLJ21362 fis, clone C | 2.09 | 3.20 |
| 442271 | AF000652 | Hs.8180 | syndecan binding protein (syntenin) | 2.09 | 1.90 |
| 428336 | AA503115 | Hs.183752 | microseminoprotein, beta- | 2.08 | 1.15 |
| 405165 | | | ENSP00000238974*: Homeobox protein NKX2-3 | 2.07 | 2.83 |
| 416999 | AW195747 | Hs.21122 | hypothetical protein FLJ11830 similar to | 2.07 | 3.71 |
| 453865 | AA307279 | Hs.35947 | methyl-CpG binding domain protein 4 | 2.07 | 1.71 |
| 439924 | AI985897 | Hs.125293 | ESTs | 2.07 | 1.00 |
| 439004 | AW979062 | | gb: EST391172 MAGE resequences, MAGP Homo | 2.07 | 2.13 |
| 407955 | BE536739 | Hs.109909 | ESTs | 2.06 | 1.91 |
| 412998 | BE046254 | | gb: hn38g09.x2 NCI_CGAP_RDF2 Homo sapiens | 2.06 | 2.58 |
| 414013 | AA766605 | Hs.47099 | hypothetical protein FLJ21212 | 2.05 | 5.00 |
| 415249 | R40515 | Hs.21248 | ESTs | 2.05 | 2.18 |
| 427332 | R09418 | Hs.261101 | ESTs, Weakly similar to I38022 hypotheti | 2.05 | 3.35 |
| 426521 | AF161445 | Hs.170219 | hypothetical protein | 2.05 | 1.00 |
| 431211 | M86849 | Hs.323733 | gap junction protein, beta 2, 26 kD (conn | 2.05 | 6.03 |
| 423851 | R39505 | Hs.133342 | Homo sapiens clone 24566 mRNA sequence | 2.05 | 1.88 |
| 410028 | AW576454 | Hs.346502 | ESTs | 2.04 | 1.95 |
| 406575 | | | Target Exon | 2.04 | 1.56 |
| 457148 | AF091035 | Hs.184627 | KIAA0118 protein | 2.04 | 3.11 |
| 449924 | W30681 | Hs.146233 | Homo sapiens cDNA: FLJ22130 fis, clone H | 2.04 | 2.42 |
| 429837 | NM_003896 | Hs.225939 | sialyltransferase 9 (CMP-NeuAc: lactosylc | 2.04 | 1.97 |
| 440675 | AW005054 | Hs.47883 | ESTs, Weakly similar to KCC1_HUMAN CALCI | 2.04 | 2.06 |
| 411988 | AA455459 | Hs.164480 | ESTs, Weakly similar to T50609 hypotheti | 2.04 | 2.65 |
| 433293 | AF007835 | Hs.32417 | hypothetical protein MGC4309 | 2.04 | 2.35 |
| 446187 | AK001241 | Hs.14229 | hypothetical protein FLJ10379 | 2.04 | 2.03 |
| 420838 | AW118210 | Hs.42321 | ESTs | 2.03 | 1.00 |
| 445481 | AW661846 | Hs.346630 | ESTs | 2.03 | 2.49 |
| 448175 | BE296174 | Hs.225160 | hypothetical protein FLJ13102 | 2.03 | 2.25 |
| 410600 | AW575742 | | ESTs, Moderately similar to S65657 alpha | 2.02 | 2.10 |
| 401177 | | | Target Exon | 2.02 | 2.59 |
| 448474 | AI792014 | Hs.13809 | hypothetical protein FLJ10648 | 2.02 | 4.23 |
| 434782 | NM_005032 | Hs.4114 | plastin 3 (T isoform) | 2.02 | 1.48 |
| 424125 | M31669 | Hs.1735 | inhibin, beta B (activin AB beta polypep | 2.02 | 2.93 |
| 424241 | AW995948 | Hs.182339 | Homo sapiens pyruvate dehydrogenase kina | 2.02 | 2.63 |
| 424673 | AA345051 | Hs.294092 | ESTs, Weakly similar to I38022 hypotheti | 2.02 | 3.43 |
| 414721 | X90392 | Hs.77091 | ribosomal protein L10 | 2.02 | 1.89 |
| 429869 | AI907018 | Hs.15977 | Target CAT | 2.02 | 1.47 |
| 439177 | AW820275 | Hs.76611 | ESTs, Weakly similar to I38022 hypotheti | 2.01 | 1.94 |
| 437175 | AW968078 | Hs.87773 | protein kinase, cAMP-dependent, catalyti | 2.01 | 1.64 |
| 452046 | AB018345 | Hs.27657 | KIAA0802 protein | 2.01 | 4.31 |
| 417615 | BE548641 | Hs.82314 | hypoxanthine phosphoribosyltransferase 1 | 2.01 | 6.75 |
| 420337 | AW295840 | Hs.14555 | Homo sapiens cDNA: FLJ21513 fis, clone C | 2.00 | 2.75 |
| 408232 | AL137269 | Hs.43899 | Homo sapiens mRNA; cDNA DKFZp434C1714 (f | 2.00 | 2.02 |
| 408409 | AW838181 | Hs.278337 | Homo sapiens cDNA FLJ11537 fis, clone HE | 2.00 | 1.95 |
| 433256 | AW604447 | Hs.339408 | ESTs, Weakly similar to S26689 hypotheti | 2.00 | 0.91 |
| 426969 | AI936504 | Hs.2083 | CDC-like kinase 1 | 2.00 | 3.60 |
| 442053 | R35343 | Hs.24968 | Human DNA sequence from clone RP1-233G16 | 2.00 | 1.95 |
| 444916 | AB028956 | Hs.12144 | KIAA1033 protein | 2.00 | 1.23 |
| 452286 | AI358570 | Hs.123933 | ESTs, Weakly similar to ZN91_HUMAN ZINC | 2.00 | 5.30 |
| 414906 | AA157911 | Hs.72200 | ESTs | 1.99 | 1.22 |
| 414176 | BE140638 | Hs.75794 | endothelial differentiation, lysophospha | 1.99 | 3.83 |
| 414557 | AA340111 | Hs.100009 | acyl-Coenzyme A oxidase 1, palmitoyl | 1.99 | 2.31 |
| 452846 | AA082160 | Hs.63368 | ESTs, Weakly similar to TRHY_HUMAN TRICH | 1.99 | 3.43 |
| 408437 | AW957744 | Hs.278469 | lacrimal proline rich protein | 1.98 | 2.15 |
| 439205 | AF087990 | Hs.42758 | Homo sapiens, clone IMAGE: 3354845, mRNA, | 1.98 | 2.28 |
| 442506 | BE566411 | | ESTs | 1.98 | 3.95 |
| 447731 | AA373527 | Hs.19385 | CGI-58 protein | 1.98 | 2.67 |
| 410579 | AK001628 | Hs.64691 | KIAA0483 protein | 1.97 | 2.43 |
| 426716 | NM_006379 | Hs.171921 | sema domain, immunoglobulin domain (lg), | 1.97 | 2.50 |
| 456141 | AI751357 | Hs.288741 | Homo sapiens cDNA: FLJ22256 fis, clone H | 1.97 | 3.03 |
| 419576 | AK002060 | Hs.91251 | hypothetical protein FLJ11198 | 1.96 | 2.88 |
| 407241 | M34516 | | gb: Human omega light chain protein 14.1 | 1.96 | 1.09 |
| 420664 | AI681270 | Hs.99824 | BCE-1 protein | 1.96 | 1.75 |
| 448586 | AF285120 | Hs.283734 | CGI-204 protein | 1.96 | 3.28 |
| 408089 | H59799 | Hs.42644 | thioredoxin-like | 1.95 | 4.00 |
| 421100 | AW351839 | Hs.124660 | Homo sapiens cDNA: FLJ21763 fis, clone C | 1.95 | 2.12 |
| 452518 | AA280722 | Hs.24758 | ESTs, Weakly similar to I38022 hypotheti | 1.95 | 3.45 |
| 432015 | AL157504 | Hs.159115 | Homo sapiens mRNA; cDNA DKFZp586O0724 (t | 1.94 | 2.80 |
| 434263 | N34895 | Hs.44648 | ESTs | 1.94 | 4.60 |
| 409829 | M33552 | Hs.56729 | lymphocyte-specific protein 1 | 1.94 | 1.79 |
| 425593 | AA278921 | Hs.1908 | proteoglycan 1, secretory granule | 1.94 | 2.30 |
| 401835 | | | Target Exon | 1.94 | 2.27 |
| 406557 | | | C5000893: gi\|6226859\|sp\|P38525\|EFG_THEMA | 1.94 | 3.28 |
| 440062 | AI350518 | Hs.129692 | ESTs | 1.94 | 3.18 |
| 410442 | X73424 | Hs.63788 | propionyl Coenzyme A carboxylase, beta p | 1.94 | 2.70 |
| 457281 | BE253012 | Hs.153400 | ESTs, Weakly similar to ALU1_HUMAN ALU S | 1.94 | 2.60 |
| 420230 | AL034344 | Hs.284186 | forkhead box C1 | 1.93 | 2.28 |
| 452970 | NM_012238 | Hs.31176 | sirtuin (silent mating type information | 1.93 | 4.35 |
| 403728 | | | Target Exon | 1.92 | 1.70 |
| 415789 | H01581 | | gb: yj33f08.r1 Soares placenta Nb2HP Homo | 1.92 | 2.15 |
| 406759 | AA654582 | Hs.77039 | ATP synthase, H transporting, mitochondr | 1.92 | 2.10 |
| 442073 | AW973443 | Hs.8086 | RNA (guanine-7-) methyltransferase | 1.92 | 4.43 |
| 438023 | AF204883 | Hs.6048 | FEM-1 (C. elegans) homolog b | 1.92 | 4.00 |
| 445502 | AW379160 | Hs.12813 | DKFZP434J214 protein | 1.92 | 2.13 |
| 405474 | | | NM_001093*: Homo sapiens acetyl-Coenzyme | 1.92 | 2.58 |
| 430007 | NM_014892 | Hs.227602 | KIAA1116 protein | 1.92 | 3.78 |
| 439937 | AF151906 | Hs.6776 | CGI-148 protein | 1.91 | 2.32 |
| 418068 | AW971155 | Hs.293902 | ESTs, Weakly similar to ISHUSS protein d | 1.91 | 1.88 |
| 444630 | AI753230 | Hs.323562 | hypothetical protein DKFZp564K142 | 1.91 | 1.61 |
| 451184 | T87943 | Hs.173638 | transcription factor 7-like 2 (T-cell sp | 1.90 | 3.35 |
| 414715 | AA587891 | Hs.904 | amylo-1,6-glucosidase, 4-alpha-glucanotr | 1.90 | 3.55 |
| 445841 | AL080115 | Hs.13370 | DKFZP564G0222 protein | 1.90 | 1.46 |
| 425284 | AF155568 | Hs.348043 | NS1-associated protein 1 | 1.90 | 3.65 |
| 437943 | NM_016353 | Hs.5943 | rec | 1.89 | 1.73 |
| 442426 | AI373062 | Hs.332938 | hypothetical protein MGC5370 | 1.89 | 2.79 |
| 400111 | | | Eos Control | 1.89 | 3.84 |
| 437762 | T78028 | Hs.154679 | synaptotagmin I | 1.89 | 1.00 |
| 404069 | | | Target Exon | 1.89 | 2.51 |
| 434809 | AW974687 | | gb: EST386776 MAGE resequences, MAGM Homo | 1.88 | 2.35 |
| 414220 | BE298094 | Hs.323806 | gb: 601118231F1 NIH_MGC_17 Homo sapiens c | 1.88 | 1.00 |
| 422506 | R20909 | Hs.300741 | sorcin | 1.87 | 2.99 |
| 417439 | AW602154 | Hs.82143 | E74-like factor 2 (ets domain transcript | 1.87 | 1.13 |
| 404391 | | | Target Exon | 1.87 | 3.00 |
| 420187 | AK001714 | Hs.95744 | hypothetical protein similar to ankyrin | 1.86 | 2.93 |
| 446950 | AA305800 | Hs.5672 | hypothetical protein AF140225 | 1.86 | 1.90 |
| 400634 | | | C10000818*: gi\|7661882\|ref\|NP_055697.1\| K | 1.86 | 2.80 |
| 408455 | C19034 | Hs.288613 | Homo sapiens cDNA FLJ14175 fis, clone NT | 1.86 | 1.32 |
| 422366 | T83882 | Hs.97927 | ESTs | 1.85 | 1.44 |
| 452170 | AF064801 | Hs.28285 | patched related protein translocated in | 1.85 | 2.64 |
| 430604 | AV650537 | Hs.247309 | succinate-CoA ligase, GDP-forming, beta | 1.85 | 1.81 |
| 426484 | AA379658 | Hs.272759 | KIAA1457 protein | 1.85 | 2.60 |
| 411609 | AW993680 | | gb: RC3-BN0034-290200-013-d08 BN0034 Homo | 1.85 | 2.10 |
| 431129 | AL137751 | Hs.263671 | Homo sapiens mRNA; cDNA DKFZp434I0812 (f | 1.84 | 3.70 |
| 412843 | AF007555 | Hs.74624 | protein tyrosine phosphatase, receptor t | 1.84 | 2.58 |
| 401512 | | | NM_014080: Homo sapiens dual oxidase-like | 1.84 | 1.52 |
| 415969 | H11294 | Hs.31047 | ESTs | 1.84 | 3.08 |
| 444736 | AA533491 | Hs.23317 | hypothetical protein FLJ14681 | 1.84 | 1.20 |
| 426418 | M90464 | Hs.169825 | collagen, type IV, alpha 5 (Alport syndr | 1.84 | 2.35 |
| 416968 | AA412686 | Hs.97955 | ESTs | 1.84 | 2.18 |
| 442961 | BE614474 | Hs.289074 | F-box only protein 22 | 1.84 | 2.18 |
| 418650 | BE386750 | Hs.86978 | prolyl endopeptidase | 1.84 | 1.98 |
| 420923 | AF097021 | Hs.273321 | differentially expressed in hematopoieti | 1.84 | 1.00 |
| 432834 | F06459 | Hs.289113 | cytochrome b5 reductase 1 (B5R.1) | 1.83 | 3.93 |
| 442485 | BE092285 | Hs.29724 | hypothetical protein FLJ13187 | 1.83 | 3.10 |
| 427699 | AW965076 | Hs.180378 | hypothetical protein 669 | 1.83 | 3.03 |
| 447387 | AI268331 | Hs.102237 | tubby super-family protein | 1.83 | 1.78 |
| 418663 | AK00100 | Hs.41690 | desmocollin 3 | 1.82 | 1.53 |
| 419733 | AW362955 | Hs.224961 | Homo sapiens cDNA FLJ14415 fis, clone HE | 1.82 | 1.00 |
| 409267 | NM_012453 | Hs.52515 | transducin (beta)-like 2 | 1.81 | 1.57 |
| 413341 | H78472 | Hs.191325 | ESTs, Weakly similar to T18967 hypotheti | 1.81 | 2.05 |
| 423810 | AL132665 | Hs.132955 | BCL2/adenovirus E1B 19 kD-interacting pro | 1.81 | 1.98 |
| 416274 | AW160404 | Hs.79126 | guanine nucleotide binding protein 10 | 1.80 | 1.91 |
| 400843 | | | NM_003105*: Homo sapiens sortilin-related | 1.80 | 4.88 |
| 442187 | N23532 | Hs.288963 | Homo sapiens cDNA: FLJ23034 fis, clone L | 1.80 | 2.61 |
| 458285 | AW296984 | Hs.255595 | ESTs, Weakly similar to A46302 PTB-assoc | 1.80 | 2.33 |
| 413753 | U17760 | Hs.75517 | laminin, beta 3 (nicein (125 kD), kalinin | 1.80 | 3.17 |
| 428004 | AA449563 | Hs.151393 | glutamate-cysteine ligase, catalytic sub | 1.80 | 1.00 |
| 401613 | | | Target Exon | 1.79 | 2.66 |
| 407173 | T64349 | | gb: yc10d08.s1 Stratagene lung (937210) H | 1.79 | 2.30 |
| 443145 | AI049671 | Hs.307763 | EST, Weakly similar to I38022 hypothetic | 1.79 | 2.00 |
| 418596 | AW976721 | Hs.293327 | ESTs | 1.79 | 3.92 |
| 437374 | AL359571 | Hs.44054 | ninein (GSK3B interacting protein) | 1.79 | 1.24 |
| 439569 | AW602166 | Hs.222399 | CEGP1 protein | 1.79 | 2.39 |
| 430677 | Z26317 | Hs.94560 | desmoglein 2 | 1.78 | 2.02 |
| 436749 | AA584890 | Hs.5302 | lectin, galactoside-binding, soluble, 4 | 1.78 | 0.96 |
| 453016 | AW295466 | Hs.232051 | ESTs, Weakly similar to dJ403A15.3 [H. sa | 1.78 | 2.60 |
| 426885 | AA393130 | Hs.193894 | ESTs, Weakly similar to A47582 B-cell gr | 1.78 | 2.47 |
| 452848 | AI417193 | Hs.288912 | hypothetical protein FLJ22604 | 1.78 | 2.17 |
| 412560 | R24601 | | CCR4-NOT transcription complex, subunit | 1.78 | 3.13 |
| 411821 | BE299339 | Hs.72249 | three-PDZ containing protein similar to | 1.78 | 1.55 |
| 428788 | AF082283 | Hs.193516 | B-cell CLL/lymphoma 10 | 1.78 | 2.36 |
| 443963 | AA878183 | Hs.17448 | Homo sapiens cDNA FLJ13618 fis, clone PL | 1.78 | 2.20 |
| 435479 | AF197137 | Hs.259737 | ATP synthase, H transporting, mitochondr | 1.78 | 2.03 |
| 413073 | AL038165 | Hs.75187 | translocase of outer mitochondrial membr | 1.77 | 2.29 |
| 442473 | W27992 | | gb: 43d9 Haman retina cDNA randomly prime | 1.77 | 2.93 |
| 418060 | AA211589 | Hs.208047 | ESTs | 1.77 | 4.19 |
| 400773 | | | NM_003105*: Homo sapiens sortilin-related | 1.77 | 1.76 |
| 400175 | | | Eos Control | 1.77 | 2.04 |
| 421501 | M29971 | Hs.1384 | O-6-methylguanine-DNA methyltransferase | 1.77 | 2.32 |
| 451234 | AI914901 | Hs.24052 | ESTs, Weakly similar to I38022 hypotheti | 1.77 | 2.43 |
| 423332 | Al091466 | Hs.127241 | sorting nexin 7 | 1.76 | 1.82 |
| 423960 | AA164516 | Hs.136309 | SH3-containing protein SH3GLB1 | 1.76 | 2.00 |
| 450489 | AI697990 | Hs.346002 | ESTs | 1.76 | 3.15 |
| 457265 | AB023212 | Hs.225967 | KIAA0995 protein | 1.76 | 2.37 |
| 413076 | U10564 | Hs.75188 | wee1 (S. pombe) homolog | 1.75 | 2.18 |
| 421948 | L42583 | Hs.334309 | keratin 6A | 1.75 | 1.00 |
| 453578 | R06875 | Hs.81810 | ESTs | 1.75 | 3.10 |
| 412430 | AW675064 | Hs.73875 | fumarylacetoacetate hydrolase (fumarylac | 1.75 | 2.14 |
| 439396 | BE562958 | Hs.74346 | hypothetical protein MGC14353 | 1.75 | 1.78 |
| 431448 | AL137517 | Hs.306201 | hypothetical protein DKFZp564O1278 | 1.75 | 2.36 |
| 449538 | AI559444 | Hs.104679 | ESTs | 1.75 | 3.07 |
| 453146 | AI338952 | Hs.32194 | ESTs | 1.74 | 2.82 |
| 426122 | NM_006925 | Hs.166975 | Splicing factor, arginine/serine-rich 5 | 1.74 | 2.88 |
| 408989 | AW361666 | Hs.49500 | KIAA0746 protein | 1.74 | 2.07 |
| 441715 | AI929453 | Hs.342655 | Homo sapiens cDNA FLJ13289 fis, clone OV | 1.74 | 2.06 |
| 412718 | X79204 | Hs.74520 | spinocerebellar ataxia 1 (olivopontocere | 1.74 | 2.46 |
| 450798 | AW167780 | Hs.50438 | ESTs | 1.74 | 2.02 |
| 445537 | AJ245671 | Hs.12844 | EGF-like-domain, multiple 6 | 1.73 | 2.58 |
| 400190 | | | Eos Control | 1.73 | 2.40 |
| 416309 | R84694 | Hs.79194 | cAMP responsive element binding protein | 1.73 | 1.48 |
| 410219 | T98226 | Hs.171952 | occludin | 1.73 | 2.75 |
| 419814 | AW402478 | Hs.93213 | BCL2-antagonist/killer 1 | 1.73 | 2.70 |
| 448625 | AW970786 | Hs.178470 | hypothetical protein FLJ22662 | 1.73 | 2.07 |
| 422387 | AA309996 | Hs.148656 | ESTs, Weakly similar to T12453 hypotheti | 1.73 | 2.02 |
| 417386 | AL037228 | Hs.82043 | D123 gene product | 1.73 | 2.44 |
| 405812 | | | Target Exon | 1.72 | 2.94 |
| 436270 | C03769 | Hs.339669 | Homo sapiens, clone IMAGE: 3947554, mRNA, | 1.72 | 2.85 |
| 409855 | AW502461 | | gb: UI-HF-BR0p-ajv-b-08-0-UI.r1 NIH_MGC_5 | 1.72 | 2.63 |
| 411442 | N25956 | Hs.101810 | Homo sapiens cDNA FLJ14232 fis, clone NT | 1.72 | 1.88 |
| 400846 | | | sortilin-related receptor, L(DLR class) | 1.72 | 1.63 |
| 401660 | | | Target Exon | 1.72 | 2.63 |
| 402190 | | | C19000835*:gi\|10946730\|ref\|NP_067362.1\| | 1.72 | 3.33 |
| 439191 | AA281177 | Hs.41182 | Homo sapiens DC47 mRNA, complete cds | 1.71 | 2.17 |
| 410444 | W73484 | Hs.132554 | gb: zd54e04.s1 Soares_fetal_heart_NbHH19W | 1.71 | 2.70 |
| 430393 | BE185030 | Hs.241305 | estrogen-responsive B box protein | 1.71 | 1.33 |
| 446066 | AI343931 | Hs.149383 | ESTs | 1.71 | 2.32 |
| 411299 | BE409857 | Hs.69499 | hypothetical protein | 1.71 | 2.92 |
| 408246 | N55669 | Hs.333823 | mitochondrial ribosomal protein L13 | 1.71 | 2.00 |
| 454054 | AI336329 | Hs.301519 | Homo sapiens cDNA FLJ12536 fis, clone NT | 1.71 | 1.93 |
| 417381 | AF164142 | Hs.82042 | solute carrier family 23 (nucleobase tra | 1.70 | 3.70 |
| 427820 | BE222494 | Hs.180919 | inhibitor of DNA binding 2, dominant neg | 1.70 | 1.60 |
| 400750 | | | Target Exon | 1.70 | 2.82 |
| 455842 | BE145837 | | gb: MR0-HT0208-101299-202-c07 HT0208 Homo | 1.70 | 2.17 |
| 429966 | BE081342 | Hs.283037 | HSPC039 protein | 1.70 | 1.18 |
| 418444 | AI902899 | Hs.85155 | butyrate response factor 1 (EGF-response | 1.70 | 2.47 |
| 437450 | AL390154 | Hs.26954 | Homo sapiens mRNA; cDNA DKFZp762G123 (fr | 1.70 | 3.03 |
| 415738 | BE539367 | Hs.295953 | ESTs, Weakly similar to AF220049 1 uncha | 1.70 | 2.34 |
| 405245 | | | Target Exon | 1.70 | 1.99 |
| 408483 | AA464836 | Hs.291079 | ESTs, Weakly similar to T27173 hypotheti | 1.70 | 2.05 |
| 413611 | BE153275 | | gb: PM0-HT0335-180400-008-e11 HT0335 Homo | 1.70 | 2.05 |
| 410190 | AW072328 | Hs.59728 | Homo sapiens mRNA; cDNA DKFZp566C0546 (f | 1.69 | 2.20 |
| 434608 | AA805443 | Hs.179909 | hypothetical protein FLJ22995 | 1.69 | 2.36 |
| 432170 | T56887 | Hs.18282 | KIAA1134 protein | 1.69 | 1.83 |
| 448182 | AF244137 | Hs.20597 | host cell factor homolog | 1.69 | 2.11 |
| 436293 | AI601188 | Hs.120910 | ESTs | 1.69 | 2.37 |
| 448524 | AB032948 | Hs.21356 | hypothetical protein DKFZp762K2015 | 1.68 | 2.48 |
| 404231 | | | Target Exon | 1.68 | 2.50 |
| 453906 | AW444952 | Hs.257054 | ESTs | 1.68 | 2.45 |
| 437967 | BE277414 | Hs.5947 | met transforming oncogene (derived from | 1.68 | 1.00 |
| 426125 | X87241 | Hs.166994 | FAT tumor suppressor (Drosophila) homolo | 1.68 | 3.51 |
| 448813 | AF169802 | Hs.22142 | cytochrome b5 reductase b5R.2 | 1.68 | 1.69 |
| 429162 | AK001250 | Hs.197642 | hypothetical protein FLJ10388 | 1.68 | 3.13 |
| 425556 | H27225 | Hs.9444 | hypothetical protein FLJ13114 | 1.67 | 2.02 |
| 405630 | | | Target Exon | 1.67 | 3.00 |
| 421405 | AA251944 | Hs.104058 | CGI-29 protein | 1.67 | 3.25 |
| 422640 | M37984 | Hs.118845 | troponin C, slow | 1.67 | 1.23 |
| 450857 | AA629075 | Hs.190090 | ESTs | 1.67 | 2.48 |
| 451668 | Z43948 | Hs.326444 | cartilage acidic protein 1 | 1.66 | 2.55 |
| 433821 | AW182416 | | ESTs | 1.66 | 2.65 |
| 405595 | | | NM_000721*: Homo sapiens calcium channel, | 1.66 | 2.23 |
| 433892 | AI929357 | Hs.323966 | Homo sapiens clone H63 unknown mRNA | 1.66 | 1.97 |
| 443558 | AA376798 | Hs.286122 | MDS024 protein | 1.66 | 2.00 |
| 412141 | AI183838 | Hs.48938 | hypothetical protein FLJ21802 | 1.66 | 2.65 |
| 424685 | W21223 | Hs.151734 | nuclear transport factor 2 (placental pr | 1.66 | 2.88 |
| 400845 | | | NM_003105*: Homo sapiens sortilin-related | 1.66 | 1.61 |
| 447816 | NM_007233 | Hs.274329 | TP53 target gene 1 | 1.66 | 2.63 |
| 404438 | | | Target Exon | 1.66 | 2.34 |
| 451543 | AA397651 | Hs.301959 | proline synthetase co-transcribed (bacte | 1.65 | 2.08 |
| 433233 | AB040927 | Hs.301804 | KIAA1494 protein | 1.65 | 3.13 |
| 420938 | AL049698 | Hs.100469 | myeloid/lymphoid or mixed-lineage leukem | 1.65 | 1.37 |
| 435438 | H84421 | Hs.4890 | ubiquitin-conjugating enzyme E2E 3 (homo | 1.65 | 2.35 |
| 431130 | NM_006103 | Hs.2719 | HE4; epididymis-specific, whey-acidic pr | 1.65 | 1.00 |
| 433235 | AB040929 | Hs.35089 | contactin 3 (plasmacytoma associated) | 1.65 | 1.44 |
| 439632 | AW410714 | Hs.334437 | hypothetical protein MGC4248 | 1.65 | 2.35 |
| 409324 | W76202 | Hs.343812 | lipoic acid synthetase | 1.65 | 2.00 |
| 452207 | NM_014517 | Hs.28423 | upstream binding protein 1 (LBP-1a) | 1.65 | 2.33 |
| 423630 | AB011132 | Hs.129952 | KIAA0560 gene product | 1.65 | 2.13 |
| 443358 | H65417 | Hs.17757 | pleckstrin homology domain-containing, f | 1.65 | 1.63 |
| 427417 | AA341061 | Hs.177861 | CGI-110 protein | 1.64 | 1.28 |
| 450353 | AI244661 | Hs.103296 | ESTs,Weakly similar to S65657 alpha-1C- | 1.64 | 1.60 |
| 445677 | H96577 | Hs.6838 | ras homolog gene family, member E | 1.64 | 1.91 |
| 447503 | AA115496 | Hs.336898 | Homo sapiens, Similar to RlKEN cDNA 1810 | 1.64 | 2.04 |
| 431234 | AL389985 | Hs.301637 | zinc finger protein 258 | 1.64 | 1.53 |
| 418032 | AW964695 | Hs.9436 | Homo sapiens, clone MGC: 15763, mRNA, com | 1.64 | 2.05 |
| 407796 | AA195509 | Hs.39733 | postsynaptic protein CRIPT | 1.64 | 2.30 |
| 446298 | AF187813 | Hs.14637 | kidney-and liver-specific gene | 1.64 | 2.05 |
| 439578 | AW263124 | Hs.315111 | nuclear receptor co-repressor/HDAC3 comp | 1.64 | 2.26 |
| 429113 | D28235 | Hs.196384 | prostaglandin-endoperoxide synthase 2 (p | 1.64 | 2.10 |
| 433646 | AA603319 | Hs.155195 | ESTs | 1.64 | 2.05 |
| 407783 | AW996872 | Hs.172028 | a disintegrin and metalloproteinase doma | 1.64 | 1.00 |
| 419982 | AA252544 | Hs.55610 | solute carrier family 30 (zinc transport | 1.64 | 2.16 |
| 401603 | | | NM_022041*: Homo sapiens giant axonal neu | 1.64 | 2.73 |
| 431604 | AF175265 | Hs.264190 | vacuolar protein sorting 35 (yeast homol | 1.64 | 2.75 |
| 400788 | | | C6000994*: gi\|10435784\|dbj\|BAB14668.1\| (A | 1.63 | 2.04 |
| 416221 | BE513171 | Hs.79086 | mitochondrial ribosomal protein L3 | 1.63 | 2.64 |
| 422491 | AA338548 | Hs.117546 | neuronatin | 1.63 | 0.96 |
| 424737 | BE301883 | Hs.152707 | glioblastoma amplified sequence | 1.63 | 3.45 |
| 416078 | AL034349 | Hs.79005 | protein tyrosine phosphatase, receptor t | 1.63 | 1.39 |
| 403988 | | | C5001831: gi\|11056014\|ref\|NP_067651.1\| ac | 1.62 | 2.11 |
| 411486 | N85785 | Hs.181165 | eukaryotic translation elongation factor | 1.62 | 2.63 |
| 407874 | AI766311 | Hs.289047 | Home sapiens cDNA FLJ14059 fis, clone HE | 1.62 | 2.19 |
| 446700 | AW206257 | Hs.156326 | Human DNA sequence from clone RP11-145L2 | 1.62 | 3.03 |
| 438184 | AA779897 | Hs.122125 | ESTs | 1.62 | 2.79 |
| 405502 | | | C7000609*: gi\|628012\|pir∥A53933 myosin I | 1.62 | 2.55 |
| 447050 | NM_016314 | Hs.17200 | STAM-like protein containing SH3 and ITA | 1.62 | 2.48 |
| 457961 | AA772119 | Hs.270721 | ESTs, Weakly similar to I38022 hypotheti | 1.62 | 2.30 |
| 436774 | AW975810 | Hs.159054 | hypothetical protein FLJ13224 | 1.62 | 2.17 |
| 414893 | AA215295 | Hs.77578 | ubiquitin specific protease 9, X chromos | 1.62 | 2.03 |
| 458660 | AI299739 | Hs.99601 | hypothetical protein FLJ12553 | 1.62 | 2.25 |
| 405806 | | | Target Exon | 1.62 | 2.15 |
| 421205 | AL137540 | Hs.102541 | netrin 4 | 1.62 | 1.00 |
| 424012 | AW368377 | Hs.137569 | tumor protein 63 kDa with strong homolog | 1.62 | 1.74 |
| 427016 | AA397525 | Hs.191579 | ESTs | 1.61 | 2.16 |
| 458182 | AI147996 | Hs.155833 | ESTs, Weakly similar to spliceosomal pro | 1.61 | 2.74 |
| 451109 | F11875 | Hs.5534 | Homo sapiens cDNA FLJ12961 fis, clone NT | 1.61 | 2.59 |
| 414807 | AI738616 | Hs.77348 | hydroxyprostaglandin dehydrogenase 15-(N | 1.61 | 1.78 |
| 456508 | AA502764 | Hs.123469 | ESTs, Weakly similar to AF208855 1 BM-01 | 1.61 | 2.10 |
| 447532 | AK000614 | Hs.18791 | hypothetical protein FLJ20607 | 1.61 | 1.75 |
| 439944 | AA856767 | Hs.124623 | ESTs | 1.61 | 2.41 |
| 414692 | H06831 | Hs.164557 | ESTs, Moderately similar to ALUC_HUMAN ! | 1.60 | 3.05 |
| 433187 | R53995 | Hs.293381 | ESTs, Moderately similar to ALU7_HUMAN A | 1.60 | 2.63 |
| 446825 | BE266822 | Hs.344097 | filamin A, alpha (actin-binding protein- | 1.60 | 2.43 |
| 441166 | AA921738 | Hs.132473 | ESTs | 1.60 | 2.69 |
| 425571 | AJ007292 | Hs.158306 | ephrin-A2 | 1.60 | 1.49 |
| 406836 | AW514501 | Hs.156110 | immunoglobulin kappa constant | 1.60 | 1.08 |
| 432374 | W68815 | Hs.301885 | Home sapiens cDNA FLJ11346 fis, clone PL | 1.60 | 1.47 |
| 449268 | AW369278 | Hs.23412 | hypothetical protein FLJ20160 | 1.60 | 2.89 |
| 400772 | | | NM_003105*: Homo sapiens sortilin-related | 1.60 | 2.57 |
| 445733 | BE295568 | Hs.13225 | UDP-Gal: betaGlcNAc beta 1,4- galactosylt | 1.60 | 2.03 |
| 428172 | U09367 | Hs.182828 | zinc finger protein 136 (clone pHZ-20) | 1.60 | 2.68 |
| 421887 | AW161450 | Hs.109201 | CGI-86 protein | 1.59 | 1.39 |
| 418127 | BE243982 | Hs.83532 | membrane cofactor protein (CD46, trophob | 1.59 | 1.67 |
| 400297 | AI127076 | Hs.306201 | hypothetical protein DKFZp564O1278 | 1.59 | 2.19 |
| 434938 | AW500718 | Hs.8115 | Homo sapiens, clone MGC: 16169, mRNA, com | 1.59 | 2.26 |
| 417924 | AU077231 | Hs.82932 | cyclin D1 (PRAD1: parathyroid adenomatos | 1.59 | 1.76 |
| 418067 | AI127958 | Hs.83393 | cystatin E/M | 1.59 | 1.26 |
| 427127 | AW802282 | Hs.22265 | pyruvate dehydrogenase phosphatase | 1.59 | 2.25 |
| 451938 | AI354355 | Hs.16697 | down-regulator of transcription 1, TBP-b | 1.59 | 2.10 |
| 407325 | AA291180 | Hs.328476 | ESTs, Weakly similar to alternatively sp | 1.58 | 2.43 |
| 410796 | Z44547 | Hs.3731 | ESTs, Moderately similar to I38022 hypot | 1.58 | 1.26 |
| 417343 | AA197132 | Hs.231581 | myosin, heavy polypeptide 1, skeletal mu | 1.58 | 2.84 |
| 416643 | U62531 | Hs.79410 | solute carrier family 4, anion exchanger | 1.58 | 1.26 |
| 400847 | | | NM_003105*: Homo sapiens sortilin-related | 1.58 | 1.48 |
| 436760 | AW606927 | Hs.5306 | hypothetical protein DKFZp586F1122 simil | 1.57 | 1.57 |
| 433427 | AI816449 | Hs.171889 | cholinephosphotransferase 1 | 1.57 | 1.64 |
| 451986 | BE246996 | Hs.318401 | hypothetical protein DKFZp564D1378 | 1.57 | 1.83 |
| 428901 | A1929568 | Hs.146668 | KIAA1253 protein | 1.57 | 2.23 |
| 426028 | NM_001110 | Hs.172028 | a disintegrin and metalloproteinase doma | 1.57 | 3.07 |
| 444604 | AW32 7695 | Hs.11441 | chromosome 1 open reading frame 8 | 1.57 | 1.86 |
| 439686 | W40445 | Hs.235857 | ESTs, Weakly similar to I38022 hypotheti | 1.57 | 3.07 |
| 426996 | AW968934 | Hs.173108 | Homo sapiens cDNA: FLJ21897 fis, clone H | 1.57 | 2.01 |
| 447343 | AA256641 | Hs.236894 | ESTs, Highly similar to S02392 alpha-2-m | 1.57 | 2.83 |
| 418942 | AI566004 | Hs.141269 | Homo sapiens cDNA: FLJ21550 fis, clone C | 1.57 | 1.21 |
| 418555 | AI417215 | Hs.87159 | hypothetical protein FLJ12577 | 1.56 | 3.08 |
| 402368 | | | NM_021155*: Homo sapiens CD209 antigen (C | 1.56 | 2.05 |
| 419749 | X73608 | Hs.93029 | sparc/osteonectin, cwcv and kazal-like d | 1.56 | 2.08 |
| 404977 | | | Insulin-like growth factor 2 (somatomedi | 1.56 | 5.50 |
| 441872 | BE567100 | Hs.154938 | hypothetical protein MDS025 | 1.56 | 2.30 |
| 415503 | U36601 | Hs.78473 | N-deacetylase/N-sulfotransferase (hepara | 1.56 | 2.56 |
| 451743 | AW074266 | Hs.23071 | ESTs | 1.56 | 1.85 |
| 423184 | NM_004428 | Hs.1624 | ephrin-A1 | 1.56 | 1.41 |
| 408041 | AW138782 | Hs.243607 | ESTs | 1.56 | 2.21 |
| 416777 | AF146760 | Hs.79844 | DKFZP564M1416 protein | 1.56 | 2.00 |
| 428013 | AF151020 | Hs.181444 | hypothetical protein | 1.56 | 1.53 |
| 410072 | BE384447 | Hs.16034 | hypothetical protein MGC13186 | 1.55 | 1.52 |
| 411495 | AP000693 | Hs.70359 | KIAA0136 protein | 1.55 | 2.88 |
| 408162 | AA993833 | Hs.118527 | ESTs | 1.55 | 2.70 |
| 413350 | U02556 | Hs.75307 | t-complex-associated-testis-expressed 1- | 1.55 | 1.99 |
| 422010 | AA302049 | Hs.31181 | Homo sapiens cDNA: FLJ23230 fis, clone C | 1.55 | 1.60 |
| 425229 | AU076961 | Hs.155212 | methylmalonyl Coenzyme A mutase | 1.55 | 2.57 |
| 425184 | BE278288 | Hs.155048 | Lutheran blood group (Auberger b antigen | 1.55 | 1.45 |
| 419011 | H56244 | Hs.89552 | glutathione S-transferase A2 | 1.55 | 2.77 |
| 417538 | AW050865 | Hs.275711 | hypothetical protein MGC2452 | 1.55 | 2.76 |
| 409806 | AW500960 | | gb: UI-HF-BP0p-aiy-b-01-0-UI.r1 NIH_MGC_5 | 1.55 | 2.45 |
| 402737 | | | Target Exon | 1.54 | 2.58 |
| 419825 | AI754011 | Hs.7326 | ESTs | 1.54 | 1.00 |
| 410001 | AB041036 | Hs.57771 | kallikrein 11 | 1.54 | 0.62 |
| 407813 | AL120247 | Hs.40109 | KIAA0872 protein | 1.54 | 2.33 |
| 415906 | AI751357 | Hs.288741 | Homo sapiens cDNA: FLJ22256 fis, clone H | 1.54 | 2.77 |
| 427886 | AA417083 | Hs.104789 | ESTs | 1.54 | 2.60 |
| 437018 | AA889078 | Hs.187033 | ESTs | 1.54 | 2.48 |
| 415049 | N67334 | Hs.50158 | ESTs | 1.54 | 2.57 |
| 422315 | U16296 | Hs.115176 | T-cell lymphoma invasion and metastasis | 1.54 | 2.57 |
| 413715 | AW851121 | Hs.75497 | Homo sapiens cDNA: FLJ22139 fis,clone H | 1.54 | 1.98 |
| 447144 | AI630759 | Hs.17481 | Homo sapiens clone 24606 mRNA sequence | 1.54 | 2.48 |
| 438924 | BE535511 | | transmembrane trafficking protein | 1.53 | 3.08 |
| 445166 | AI656116 | Hs.147451 | ESTs | 1.53 | 2.08 |
| 414073 | AF068293 | Hs.75737 | pericentriolar material 1 | 1.53 | 1.70 |
| 402378 | | | Target Exon | 1.53 | 2.83 |
| 452316 | AA298484 | Hs.61265 | ESTs, Moderately similar to G786_HUMAN P | 1.53 | 1.60 |
| 450374 | AA397540 | Hs.60293 | Homo sapiens clone 122482 unknown mRNA | 1.53 | 3.59 |
| 402617 | | | C1003551: gi\|6678593\|ref\|NP_033547.1\| win | 1.53 | 2.75 |
| 406837 | R70292 | Hs.156110 | immunoglobulin kappa constant | 1.53 | 1.01 |
| 410573 | AF151057 | Hs.64595 | aminoadipate-semialdehyde dehydrogenase- | 1.53 | 1.23 |
| 426359 | AA376409 | Hs.1 0862 | Homo sapiens cDNA: FLJ23313 fis, clone H | 1.53 | 0.67 |
| 434445 | AI349306 | Hs.11782 | ESTs | 1.53 | 2.80 |
| 452717 | AW160399 | Hs.30376 | hypothetical protein | 1.53 | 2.01 |
| 420465 | AL080276 | Hs.70488 | similar to prokaryotic-type class I pept | 1.53 | 2.25 |
| 437404 | AA868974 | Hs.180992 | ESTs | 1.53 | 2.00 |
| 459192 | AW176180 | | gb: RC2-BT0214-010999-001-E07 BT0214 Homo | 1.52 | 3.20 |
| 446457 | AI300580 | Hs.345281 | ESTs, Moderately similar to ALU1_HUMAN A | 1.52 | 2.35 |
| 441466 | AW673081 | Hs.54828 | ESTs | 1.52 | 1.99 |
| 421810 | AK001718 | Hs.108530 | hypothetical protein FLJ10856 | 1.52 | 2.98 |
| 447769 | AW873704 | Hs.320831 | Homo sapiens cDNA FLJ14597 fis, clone NT | 1.52 | 2.47 |
| 414882 | D79994 | Hs.77546 | Homo sapiens cDNA: FLJ21983 fis, clone H | 1.52 | 2.55 |
| 442169 | W21813 | Hs.8125 | Homo sapiens mRNA; cDNA DKFZp586E1521 (f | 1.52 | 1.31 |
| 404349 | | | Target Exon | 1.52 | 2.74 |
| 416278 | AA356366 | Hs.79137 | protein-L-isoaspartate (D-aspartate) O-m | 1.52 | 2.93 |
| 431846 | BE019924 | Hs.271580 | uroplakin 1B | 1.52 | 1.01 |
| 431958 | X63629 | Hs.2877 | cadherin 3, type 1, P-cadherin (placenta | 1.52 | 0.93 |
| 442670 | BE410050 | Hs.11859 | hypothetical protein FLJ13188 | 1.52 | 2.70 |
| 441617 | AA581863 | Hs.178485 | Homo sapiens cDNA FLJ13919 fis, clone Y7 | 1.52 | 1.65 |
| 440079 | AI557284 | Hs.6900 | ring finger protein 13 | 1.52 | 1.76 |
| 432831 | AI821702 | Hs.115959 | ESTs, Weakly similar to I38022 hypotheti | 1.52 | 2.13 |
| 414320 | U13616 | Hs.75893 | ankyrin 3, node of Ranvier (ankyrin G) | 1.52 | 2.13 |
| 442149 | AB014550 | Hs.8118 | KIAA0650 protein | 1.52 | 1.00 |
| 457747 | AW975000 | | gb: EST387105 MAGE resequences, MAGN Homo | 1.51 | 2.38 |
| 419433 | AA814807 | Hs.7395 | hypothetical protein FLJ23182 | 1.51 | 2.50 |
| 431812 | AA515902 | Hs.130650 | ESTs | 1.51 | 1.64 |
| 415477 | NM_002228 | Hs.78465 | v-jun avian sarcoma virus 17 oncogene ho | 1.51 | 2.62 |
| 447580 | AI953360 | Hs.133487 | ESTs | 1.51 | 2.02 |
| 416926 | H03109 | Hs.108920 | HT018 protein | 1.51 | 2.22 |
| 442755 | W57656 | Hs.109701 | ubiquitin-like 5 | 1.51 | 1.34 |
| 448694 | AA478756 | Hs.194477 | E3 ubiquitin ligase SMURF2 | 1.51 | 2.24 |
| 422675 | BE018517 | Hs.119140 | eukaryotic translation initiation factor | 1.51 | 1.49 |
| 404397 | | | ENSP00000251675*: KIAA1550 protein (Fragm | 1.51 | 2.18 |
| 412927 | AA284018 | Hs.75063 | human immunodeficiency virus type I enha | 1.51 | 1.33 |
| 402371 | | | Target Exon | 1.51 | 3.22 |
| 431730 | AF208856 | Hs.268122 | hypothetical protein | 1.51 | 1.57 |
| 417715 | AW969587 | Hs.86366 | ESTs | 1.51 | 1.59 |
| 451117 | AA015752 | Hs.205173 | ESTs | 1.50 | 2.70 |
| 434727 | H43374 | Hs.7890 | Homo sapiens mRNA for KIAA1671 protein, | 1.50 | 3.53 |
| 442297 | NM_006202 | Hs.89901 | phosphodiesterase 4A, cAMP-specific (dun | 1.50 | 2.24 |
| 425883 | AL137708 | Hs.161031 | Homo sapiens mRNA; cDNA DKFZp434K0322 (f | 1.50 | 1.13 |
| 452658 | N88604 | Hs.30212 | thyroid receptor interacting protein 15 | 1.50 | 1.62 |
| 428695 | AI355647 | Hs.189999 | purinergic receptor (family A group 5) | 1.50 | 1.00 |
| 438967 | H30340 | Hs.173705 | Homo sapiens cDNA: FLJ22050 fis, clone H | 1.50 | 1.05 |
| 419847 | AW390601 | Hs.184544 | Homo sapiens, clone IMAGE: 3355383, mRNA, | 1.50 | 2.53 |
| 431369 | BE184455 | Hs.251754 | secretory leukocyte protease inhibitor( | 1.49 | 0.97 |
| 433265 | AB040971 | Hs.35096 | KIAA1538 protein | 1.49 | 1.44 |
| 408136 | AL041135 | Hs.42959 | KIAA1012 protein | 1.49 | 2.24 |
| 455485 | AA102287 | Hs.26756 | hypothetical protein FLJ20896 | 1.49 | 2.40 |
| 418863 | AL135743 | Hs.25566 | ESTs, Weakly similar to 2004399A chromos | 1.49 | 2.84 |
| 405193 | | | C7000789: gi\|1943947\|gb\|AAC48716.1\| (U901 | 1.48 | 2.20 |
| 408948 | AW296713 | Hs.221441 | ESTs | 1.48 | 2.20 |
| 426088 | AF038007 | Hs.166196 | ATPase, Class I, type 8B, member 1 | 1.48 | 2.24 |
| 405932 | | | C15000305: gi\|3806122\|gb\|AAC69198.1\| (AF0 | 1.48 | 1.48 |
| 454034 | NM_000691 | Hs.575 | aldehyde dehydrogenase 3 family, member | 1.48 | 1.16 |
| 422355 | AW403724 | Hs.300697 | coagulation factor VII (serum prothrombi | 1.48 | 1.20 |
| 428044 | AA093322 | Hs.301404 | RNA binding motif protein 3 | 1.48 | 2.38 |
| 416166 | AW501907 | Hs.261734 | Homo sapiens cDNA: FLJ22807 fis,clone K | 1.48 | 1.28 |
| 430453 | BE387060 | Hs.3903 | Cdc42 effector protein 4; binder of Rho | 1.48 | 2.73 |
| 401600 | BE247275 | | U5 snRNP-specific protein, 116 kD | 1.48 | 2.53 |
| 432638 | AI017717 | | chromosome 21 open reading frame 15 | 1.48 | 2.03 |
| 405194 | | | C7000789: gi\|1943947\|gb\|AAC48716.1\| (U901 | 1.48 | 2.00 |
| 416179 | R19015 | Hs.79067 | MAD (mothers against decapentaplegic, Dr | 1.48 | 1.25 |
| 450272 | AI075170 | Hs.20010 | ESTs | 1.48 | 2.35 |
| 413709 | BE158687 | | gb: CM0-HT0395-280100-169-b09 HT0395 Homo | 1.48 | 2.08 |
| 442607 | AA507576 | Hs.288361 | Homo sapiens cDNA: FLJ22696 fis, clone H | 1.48 | 1.00 |
| 410418 | D31382 | Hs.63325 | transmembrane protease, serine 4 | 1.47 | 1.91 |
| 436566 | BE545586 | Hs.278712 | Homo sapiens cDNA FLJ11074 fis, clone PL | 1.47 | 2.26 |
| 404769 | | | NM_007037*: Homo sapiens a disintegrin-li | 1.47 | 1.24 |
| 420132 | BE079847 | Hs.301914 | gb: RC6-BT0627-220300-012-D06 BT0627 Homo | 1.47 | 2.00 |
| 448356 | AL120837 | Hs.20993 | high-glucose-regulated protein 8 | 1.47 | 2.90 |
| 421628 | AL121317 | Hs.106210 | hypothetical protein FLJ10813 | 1.47 | 4.08 |
| 449059 | AK000566 | Hs.98135 | hypothetical protein FLJ20559 | 1.47 | 3.13 |
| 449029 | N28989 | Hs.22891 | solute carrier family 7 (cationic amino | 1.47 | 1.06 |
| 422119 | AI277829 | Hs.111862 | KIAA0590 gene product | 1.47 | 1.51 |
| 438713 | H16902 | | ESTs | 1.47 | 2.39 |
| 418248 | NM_005000 | Hs.83916 | NM_005000*: Homo sapiens NADH dehydrogena | 1.47 | 1.00 |
| 419125 | AA642452 | Hs.130881 | B-cell CLL/lymphoma 11A (zinc finger pro | 1.46 | 2.20 |
| 420548 | AA278246 | Hs.920 | ESTs | 1.46 | 2.13 |
| 424258 | AA433848 | Hs.107882 | hypothetical protein FLJ10659 | 1.46 | 1.98 |
| 414683 | S78296 | Hs.76888 | hypothetical protein MGC12702 | 1.46 | 1.45 |
| 427045 | H86504 | Hs.173328 | protein phosphatase 2, regulatory subuni | 1.46 | 2.31 |
| 446646 | BE552004 | Hs.26192 | ESTs, Weakly similar to ALU1_HUMAN ALU S | 1.46 | 1.30 |
| 427257 | AI026805 | Hs.97726 | ESTs | 1.46 | 2.48 |
| 422971 | AI879223 | Hs.145409 | RAB, member of RAS oncogene family-like | 1.46 | 1.05 |
| 451334 | AI122691 | Hs.13268 | ESTs | 1.46 | 2.12 |
| 403326 | | | C2000428*: gi\|7705383\|ref\|NP_057536.1\| GC | 1.46 | 2.40 |
| 453827 | AF201948 | Hs.35660 | BUP protein | 1.46 | 1.65 |
| 423599 | AI805664 | Hs.31731 | peroxiredoxin 5 | 1.46 | 1.56 |
| 410691 | AW239226 | Hs.65450 | reticulon 4 | 1.46 | 1.49 |
| 430688 | AL022101 | Hs.104991 | hypothetical protein similar to preferen | 1.46 | 2.45 |
| 438083 | AI949940 | Hs.121924 | ESTs | 1.46 | 2.00 |
| 430713 | AA351647 | Hs.2642 | eukaryotic translation elongation factor | 1.45 | 1.60 |
| 437325 | AF142481 | Hs.5548 | f-box and leucine-rich repeat protein 5 | 1.45 | 1.26 |
| 403342 | | | Target Exon | 1.45 | 2.21 |
| 438808 | M73980 | Hs.129053 | Homo sapiens NOTCH 1 (N1) mRNA, complete | 1.45 | 2.40 |
| 446493 | AK001389 | Hs.15144 | hypothetical protein DKFZp564O043 | 1.45 | 3.65 |
| 414895 | AW894856 | Hs.116278 | Homo sapiens cDNA FLJ13571 fis, clone PL | 1.44 | 2.71 |
| 442072 | AI740832 | Hs.12311 | Homo sapiens clone 23570 mRNA sequence | 1.44 | 1.08 |
| 425723 | NM_014420 | Hs.159311 | dickkopf (Xenopus laevis) homolog 4 | 1.44 | 2.24 |
| 432901 | AI554929 | Hs.281866 | ATPase, H transporting, lysosomal (vacuo | 1.44 | 1.63 |
| 412210 | AW901492 | | gb: RC0-NN1012-270300-031-h10 NN1012 Homo | 1.44 | 2.15 |
| 421685 | AF189723 | Hs.106778 | ATPase, Ca transporting, type 2C, member | 1.44 | 1.83 |
| 428115 | AB023194 | Hs.300855 | KIAA0977 protein | 1.44 | 1.31 |
| 442358 | BE567985 | Hs.18585 | ESTs, Moderately similar to ALU4_HUMAN A | 1.44 | 2.47 |
| 414685 | L39874 | Hs.76894 | dCMP deaminase | 1.44 | 1.25 |
| 413798 | AA336708 | Hs.75546 | capping protein (actin filament) muscle | 1.44 | 1.26 |
| 410937 | AA218564 | Hs.67052 | vacuolar protein sorting 26 (yeast homol | 1.44 | 1.41 |
| 400397 | AJ270770 | | transcription factor 7-like 2 (T-cell sp | 1.44 | 3.43 |
| 405902 | | | Target Exon | 1.44 | 2.65 |
| 433976 | AA620987 | Hs.190268 | ESTs | 1.44 | 2.46 |
| 405376 | | | Target Exon | 1.44 | 2.28 |
| 436086 | Z43133 | Hs.9961 | Home sapiens cDNA: FLJ21954 fis, clone H | 1.44 | 1.34 |
| 418182 | AW016405 | Hs.16648 | ESTs | 1.44 | 2.35 |
| 430307 | BE513442 | Hs.238944 | hypothetical protein FLJ10631 | 1.43 | 1.55 |
| 434924 | AA443164 | Hs.23259 | hypothetical protein FLJ13433 | 1.43 | 2.05 |
| 417821 | BE245149 | Hs.82643 | protein tyrosine kinase 9 | 1.43 | 2.15 |
| 404744 | | | Target Exon | 1.43 | 1.99 |
| 405418 | | | Target Exon | 1.43 | 2.83 |
| 402869 | | | Target Exon | 1.43 | 2.40 |
| 451608 | AA384525 | Hs.26745 | hypothetical protein | 1.43 | 1.22 |
| 424099 | AF071202 | Hs.139336 | ATP-binding cassette, sub-family C (CFTR | 1.43 | 2.45 |
| 401041 | | | C11000425: gi\|4507721\|ref\|NP_003310.1\| ti | 1.43 | 2.90 |
| 417839 | AI815732 | Hs.82712 | fragile X mental retardation, autosomal | 1.43 | 2.84 |
| 409245 | AA361037 | Hs.288036 | tRNA isopentenylpyrophosphate transferas | 1.43 | 2.65 |
| 447808 | NM_007265 | Hs.19673 | suppressor of S. cerevisiae gcr2 | 1.43 | 2.00 |
| 456492 | AA330047 | Hs.191187 | ESTs | 1.43 | 2.73 |
| 449244 | AW859979 | Hs.32204 | ESTs | 1.42 | 1.57 |
| 413094 | H24184 | Hs.25413 | TOLLIP protein | 1.42 | 1.33 |
| 452407 | AA682909 | Hs.29353 | brain-specific protein p25 alpha | 1.42 | 2.50 |
| 407674 | AW064061 | Hs.279145 | ESTs | 1.42 | 2.35 |
| 441297 | AW403084 | Hs.7766 | ubiquitin-conjugating enzyme E2E 1 (homo | 1.42 | 2.20 |
| 421932 | W51778 | Hs.323949 | kangai 1 (suppression of tumorigenicity | 1.42 | 1.48 |
| 426348 | BE466586 | Hs.17433 | hypothetical protein FLJ20967 | 1.42 | 1.83 |
| 432554 | AI479813 | Hs.278411 | NCK-associated protein 1 | 1.42 | 2.46 |
| 431735 | AW977724 | Hs.75968 | thymosin, beta 4, X chromosome | 1.42 | 1.30 |
| 429953 | NM_004376 | Hs.226581 | COX15 (yeast) homolog, cytochrome c oxid | 1.42 | 1.50 |
| 444037 | AV647686 | Hs.42733 | CHMP1.5 protein | 1.42 | 1.38 |
| 402144 | | | Target Exon | 1.42 | 2.38 |
| 456758 | AA325170 | Hs.224627 | ESTs, Weakly similar to FAHUAA alpha-act | 1.42 | 2.23 |
| 452322 | BE566343 | Hs.28988 | glutaredoxin (thioltransferase) | 1.42 | 2.18 |
| 426863 | AL137657 | Hs.172803 | hypothetical protein MGC10327 | 1.41 | 1.38 |
| 410684 | AA088500 | Hs.170298 | ESTs | 1.41 | 1.28 |
| 401784 | | | NM_002280*: Homo sapiens keratin, hair, a | 1.41 | 1.37 |
| 427523 | BE242779 | Hs.179526 | upregulated by 1,25-dihydroxyvitamin D-3 | 1.41 | 1.32 |
| 449269 | AI564682 | Hs.175870 | ESTs | 1.41 | 1.37 |
| 406467 | | | Target Exon | 1.41 | 1.80 |
| 444339 | T96555 | Hs.31562 | ESTs | 1.41 | 2.94 |
| 431563 | AI027643 | Hs.120912 | ESTs | 1.41 | 1.41 |
| 413343 | BE392026 | Hs.334346 | hypothetical protein MGC13045 | 1.41 | 1.21 |
| 447537 | AW295072 | Hs.346408 | ESTs, Weakly similar to AF193556 1 sacsi | 1.41 | 2.07 |
| 428211 | AA424211 | Hs.183176 | ESTs | 1.41 | 1.25 |
| 406248 | | | Target Exon | 1.41 | 2.40 |
| 437412 | BE069288 | Hs.34744 | Homo sapiens mRNA; cDNA DKFZp547C136 (fr | 1.41 | 1.39 |
| 414653 | M24486 | Hs.76768 | procollagen-proline, 2-oxoglutarate 4-di | 1.41 | 1.33 |
| 403885 | | | Target Exon | 1.41 | 2.58 |
| 439459 | AF086279 | Hs.58013 | ESTs | 1.41 | 2.08 |
| 419075 | T84266 | Hs.123927 | ESTs | 1.41 | 2.84 |
| 405022 | | | Target Exon | 1.40 | 2.55 |
| 401346 | BE041451 | | hypothetical protein | 1.40 | 2.38 |
| 415660 | AI909007 | Hs.78563 | ubiquitin-conjugating enzyme E2G 1 (homo | 1.40 | 2.38 |
| 448023 | AI693299 | Hs.170388 | ESTs | 1.40 | 2.38 |
| 435962 | AA702820 | Hs.291294 | ESTs | 1.40 | 2.10 |
| 432480 | AA205475 | Hs.275865 | ribosomal protein S18 | 1.40 | 1.37 |
| 414309 | AK000639 | Hs.758840 | DFZP586A011 protein | 1.40 | 1.18 |
| 440256 | U23841 | Hs.18851 | hypothetical protein FLJ10875 | 1.40 | 1.91 |
| 413809 | L25851 | Hs.851 | integrin, alpha E (antigen CD103, human | 1.40 | 2.80 |
| 408176 | AK001553 | Hs.43436 | adenylate kinase 3 alpha like | 1.40 | 2.73 |
| 433960 | AW629188 | Hs.188929 | ESTs | 1.40 | 1.99 |
| 404178 | | | C6001430*: gi\|4503521\|ref\|NP_001559.1\| mu | 1.40 | 2.83 |
| 402449 | | | Target Exon | 1.40 | 1.51 |
| 455604 | BE011183 | | gb: PM3-2N0218-100500-003-d09 BN0218 Homo | 1.40 | 2.30 |
| 429221 | AI821060 | Hs.198271 | Target CAT | 1.40 | 1.22 |
| 422122 | AA383642 | Hs.111894 | lysosomal-associated protein transmembra | 1.40 | 1.42 |
| 406231 | | | Target Exon | 1.40 | 2.60 |
| 405879 | | | Target Exon | 1.40 | 2.73 |
| 450936 | AI033745 | | gb: ow23a10.x1 Soares_parathyroid_tumor_N | 1.40 | 1.13 |
| 403381 | | | ENSP00000231844*: Ecotropic virus integra | 1.39 | 6.03 |
| 453258 | AW293134 | Hs.32597 | ring finger protein (C3H2C3 type) 6 | 1.39 | 3.20 |
| 448261 | BE244072 | Hs.20815 | macrophage erythroblast attacher | 1.39 | 1.33 |
| 427666 | AI791495 | Hs.180142 | calmodulin-like skin protein (CLSP) | 1.39 | 2.30 |
| 413859 | AW992356 | Hs.8364 | Homo sapiens pyruvate dehydrogenase kina | 1.39 | 1.53 |
| 407704 | BE315072 | Hs.78768 | malignant cell expression-enhanced gene/ | 1.39 | 1.34 |
| 430138 | AA936296 | Hs.234265 | DKFZP586G011 protein | 1.39 | 2.38 |
| 432841 | M93425 | Hs.62 | protein tyrosine phosphatase, non-recept | 1.39 | 2.88 |
| 444051 | N48373 | Hs.10247 | activated leucocyte cell adhesion molecu | 1.39 | 1.34 |
| 440704 | M69241 | Hs.162 | insulin-like growth factor binding prote | 1.39 | 1.61 |
| 450092 | AW139606 | Hs.221057 | ESTs, Weakly similar to ALU1_HUMAN ALU S | 1.39 | 2.78 |
| 400275 | | | NM_006513*: Homo sapiens seryl-tRNA synth | 1.39 | 2.03 |
| 403725 | | | Target Exon | 1.39 | 2.03 |
| 443211 | AI128388 | Hs.143655 | ESTs | 1.39 | 1.83 |
| 421510 | AK000919 | Hs.105191 | hypothetical protein FLJ10057 | 1.39 | 2.83 |
| 430071 | AA355986 | Hs.232068 | transcription factor 8 (represses interl | 1.38 | 3.54 |
| 451545 | AI802128 | Hs.208647 | ESTs | 1.38 | 2.21 |
| 439897 | NM_015310 | Hs.6763 | KIAA0942 protein | 1.38 | 3.65 |
| 423872 | AB020316 | Hs.134015 | uronyl 2-sulfotransferase | 1.38 | 1.00 |
| 410344 | AW978436 | Hs.62515 | KIAA0494 gene product | 1.38 | 2.25 |
| 404439 | | | ENSP00000067222*: Mitochondrial 28S ribos | 1.38 | 2.25 |
| 448581 | NM_002709 | Hs.21537 | protein phosphatase 1, catalytic subunit | 1.38 | 1.47 |
| 408569 | BE066047 | Hs.86412 | chromosome 9 open reading frame 5 | 1.38 | 1.27 |
| 447643 | H10767 | Hs.238465 | nGAP-like protein | 1.38 | 1.22 |
| 401593 | | | Target Exon | 1.38 | 2.58 |
| 403807 | | | NM_031889: Homo sapiens enamelin (ENAM), | 1.38 | 2.38 |
| 406356 | N47812 | | CGI-35 protein | 1.38 | 2.25 |
| 401886 | | | NM_021783: Homo sapiens XEDAR (XEDAR), mR | 1.38 | 2.00 |
| 421110 | AJ250717 | Hs.1355 | cathepsin E | 1.38 | 8.93 |
| 427449 | AW946384 | Hs.178112 | DNA segment single copy probe LNS-CAI/L | 1.38 | 1.44 |
| 427451 | AI690916 | Hs.178137 | transducer of ERBB2, 1 | 1.38 | 2.81 |
| 440681 | AW449696 | Hs.166547 | ESTs | 1.38 | 2.95 |
| 419590 | AF005043 | Hs.91390 | poly (ADP-ribose) glycohydrolase | 1.38 | 2.10 |
| 446044 | H67567 | Hs.13572 | calcium modulating ligand | 1.37 | 2.62 |
| 400967 | | | Target Exon | 1.37 | 3.12 |
| 414506 | AF075337 | Hs.76293 | thymosin, beta 10 | 1.37 | 1.18 |
| 402599 | | | NM_021186*: Homo sapiens zona pellucida g | 1.37 | 2.68 |
| 422932 | AI191813 | Hs.308220 | ESTs | 1.37 | 2.38 |
| 433889 | AK002082 | Hs.3623 | hypothetical protein FLJ11220 | 1.37 | 2.23 |
| 429802 | H09548 | Hs.5367 | ESTs, Weakly similar to I38022 hypotheti | 1.37 | 2.25 |
| 443856 | AK000574 | Hs.9908 | nitrogen fixation cluster-like | 1.37 | 1.28 |
| 453489 | AA300067 | Hs.33032 | hypothetical protein DKFZp434N185 | 1.37 | 2.15 |
| 424670 | W61215 | Hs.116651 | epithelial V-like antigen 1 | 1.37 | 1.66 |
| 428995 | AW004975 | Hs.194716 | MAD (mothers against decapentaplegic, Dr | 1.37 | 1.33 |
| 441551 | AA318224 | Hs.296141 | ESTs | 1.37 | 2.95 |
| 450528 | NM_014072 | Hs.25063 | PRO0461 protein | 1.37 | 1.19 |
| 427605 | NM_000997 | Hs.337445 | ribosomal protein L37 | 1.37 | 1.31 |
| 459237 | AA031675 | Hs.31917 | Homo sapiens, clone MGC: 9658, mRNA, comp | 1.37 | 2.50 |
| 413691 | AB023173 | Hs.75478 | ATPase, Class VI, type 11B | 1.37 | 1.31 |
| 404906 | | | NM_025213: Homo sapiens spectrin, beta, n | 1.36 | 3.08 |
| 436246 | AW450963 | Hs.119991 | ESTs | 1.36 | 1.00 |
| 441478 | AA350018 | Hs.301342 | hypothetical protein MGC4342 | 1.36 | 1.43 |
| 419715 | AF070523 | Hs.92384 | vitamin A responsive; cytoskeleton relat | 1.36 | 1.28 |
| 426251 | M24283 | Hs.168383 | intercellular adhesion molecule 1 (CD54) | 1.36 | 2.16 |
| 400129 | | | Eos Control | 1.36 | 2.03 |
| 450447 | AF212223 | Hs.25010 | hypothetical protein P15-2 | 1.36 | 2.13 |
| 434697 | AL133033 | Hs.4084 | KIAA1025 protein | 1.36 | 2.01 |
| 430308 | BE540865 | Hs.238990 | cyclin-dependent kinase inhibitor 1B (p2 | 1.36 | 2.03 |
| 434767 | AF153201 | | C2H2 (Kruppel-type) zinc finger protein | 1.36 | 2.87 |
| 459729 | AL037285 | Hs.289848 | EST, Weakly similar to ALU4_HUMAN ALU SU | 1.36 | 1.27 |
| 426653 | AA530892 | Hs.171695 | deal specificity phosphatase 1 | 1.35 | 2.20 |
| 408912 | AB011084 | Hs.48924 | KIAA0512 gene product; ALEX2 | 1.35 | 2.68 |
| 409844 | AW502336 | | gb: UI-HF-BR0p-aka-b-05-0-UI.r1 NIH_MGC_5 | 1.35 | 2.29 |
| 402517 | | | Target Exon | 1.35 | 2.10 |
| 447042 | AB035863 | Hs.182217 | succinate-CoA ligase, ADP-forming, beta | 1.35 | 1.25 |
| 405000 | | | Target Exon | 1.35 | 2.32 |
| 452065 | AK000360 | Hs.27721 | Wolf-Hirschhorn syndrome candidate 1-lik | 1.35 | 2.36 |
| 404666 | | | C9000748: gi\|8324209\|gb\|AAB34384.2\| (S775 | 1.35 | 2.55 |
| 451081 | AI078645 | Hs.431 | murine leukemia viral (bmi-1) oncogene h | 1.35 | 1.70 |
| 427979 | BE379776 | Hs.181309 | proteasome (prosome, macropain) subunit, | 1.35 | 2.23 |
| 435825 | R16702 | Hs.91147 | ESTs | 1.35 | 2.39 |
| 426469 | BE297886 | Hs.293970 | methylmalonate-semialdehyde dehydrogenas | 1.35 | 1.40 |
| 447002 | BE242866 | Hs.16933 | HepA-related protein | 1.34 | 2.88 |
| 410946 | AW811502 | | gb: QV2-ST0145-061299-015-b04 ST0145 Homo | 1.34 | 2.02 |
| 454383 | AW500332 | Hs.11114 | hypothetical protein dJ1181N3.1 | 1.34 | 2.13 |
| 440512 | AA887845 | Hs.19673 | suppressor of S. cerevisiae gcr2 | 1.34 | 2.05 |
| 409865 | AW502208 | | gb: UI-HF-BR0p-aju-e-09-0-UI.r1 NIH_MGC_5 | 1.34 | 2.63 |
| 447390 | X95384 | Hs.18426 | translational inhibitor protein p14.5 | 1.34 | 1.00 |
| 450293 | N36754 | Hs.171118 | hypothetical protein FLJ00026 | 1.34 | 2.45 |
| 445831 | NM_006055 | Hs.13351 | LanC (bacterial lantibiotic synthetase c | 1.34 | 1.60 |
| 418610 | AW245993 | Hs.223394 | hypothetical protein MGC2742 | 1.34 | 1.39 |
| 441946 | AW298716 | Hs.120775 | ESTs | 1.34 | 2.30 |
| 446192 | H49944 | Hs.14231 | selenoprotein W, 1 | 1.34 | 1.17 |
| 416285 | BE537973 | Hs.48617 | Homo sapiens cDNA FLJ12540 fis, clone NT | 1.34 | 2.22 |
| 425590 | AI954686 | Hs.158321 | beaded filament structural protein 2, ph | 1.34 | 2.50 |
| 407498 | U28131 | | gb: Human HMGI-C chimeric transcript mRNA | 1.34 | 2.13 |
| 441331 | AI216764 | Hs.149971 | ESTs, Moderately similar to ALUB_HUMAN! | 1.34 | 2.05 |
| 411789 | AF245505 | Hs.72157 | Adlican | 1.34 | 1.27 |
| 420542 | NM_000505 | Hs.1321 | coagulation factor XII (Hageman factor) | 1.33 | 1.25 |
| 413892 | AI878921 | Hs.75607 | myristoylated alanine-rich protein kinas | 1.33 | 1.41 |
| 439750 | AL359053 | Hs.57664 | Homo sapiens mRNA full length insert cDN | 1.33 | 1.99 |
| 414861 | AL119396 | Hs.77508 | glutamate dehydrogenase 1 | 1.33 | 1.66 |
| 421687 | AL035306 | Hs.106823 | hypothetical protein MGC14797 | 1.33 | 2.18 |
| 410846 | AW807057 | | gb: MR4-ST0062-031199-018-b03 ST0062 Homo | 1.33 | 2.07 |
| 443937 | R66571 | Hs.24601 | ESTs | 1.33 | 2.02 |
| 432360 | BE045243 | Hs.274416 | Target CAT | 1.33 | 1.12 |
| 443119 | AA312264 | Hs.7980 | hypothetical protein MGC12966 | 1.33 | 2.68 |
| 438464 | AA669735 | Hs.324743 | protein phosphatase 4 regulatory subunit | 1.33 | 1.99 |
| 401371 | | | ENSP00000198192*: BA438F9.1 (novel protei | 1.33 | 1.10 |
| 405443 | | | Target Exon | 1.33 | 2.11 |
| 453764 | BE008180 | Hs.282846 | Homo sapiens cDNA FLJ14353 fis, clone Y7 | 1.33 | 2.88 |
| 424924 | AL039103 | Hs.153834 | pumilio (Drosophila) homolog 1 | 1.33 | 1.24 |
| 453555 | N23574 | Hs.123649 | ESTs, Moderately similar to ALU7_HUMAN A | 1.33 | 2.23 |
| 404343 | | | C7002191*: gi\|5053028\|gb\|AAD38811.1\|AF155 | 1.33 | 1.04 |
| 412383 | AW947577 | | gb: RC0-MT0004-140300-031-b09 MT0004 Homo | 1.33 | 2.06 |
| 404250 | | | Target Exon | 1.33 | 2.53 |
| 413899 | AF083892 | Hs.75608 | tight junction protein 2 (zona occludens | 1.33 | 2.81 |
| 422716 | AI702835 | Hs.124475 | ESTs, Weakly similar to YEF4_YEAST HYPOT | 1.33 | 2.30 |
| 448862 | AI351979 | Hs.152717 | hypothetical protein FLJ13725 | 1.33 | 1.08 |
| 409540 | AW409569 | | gb: fh01e09.x1 NIH_MGC_17 Homo sapiens cD | 1.33 | 2.18 |
| 431186 | NM_012249 | Hs.250697 | ras-like protein | 1.32 | 1.39 |
| 402754 | | | NM_022469*: Homo sapiens hypothetical pro | 1.32 | 1.16 |
| 420798 | W93774 | Hs.99936 | keratin 10 (epidermolytic hyperkeratosis | 1.32 | 2.02 |
| 459710 | AI701596 | Hs.121592 | ESTs | 1.32 | 2.70 |
| 435192 | AK000739 | Hs.4835 | eukaryotic translation initiation factor | 1.32 | 2.22 |
| 401383 | | | Target Exon | 1.32 | 2.18 |
| 453394 | AW960474 | Hs.40289 | ESTs | 1.32 | 2.20 |
| 421820 | AW662990 | Hs.294133 | heme-binding protein | 1.32 | 1.24 |
| 444047 | AI097452 | Hs.135095 | ESTs | 1.32 | 2.95 |
| 440860 | R10482 | Hs.132876 | ESTs | 1.32 | 2.83 |
| 425808 | AA364109 | Hs.177990 | ESTs | 1.32 | 2.11 |
| 456558 | BE410992 | Hs.258730 | heme-regulated initiation factor 2-alpha | 1.32 | 2.05 |
| 447015 | AB033029 | Hs.16953 | KIAA1203 protein | 1.32 | 1.30 |
| 414015 | AA340987 | Hs.75693 | prolylcarboxypeptidase (angiotensinase C | 1.32 | 1.39 |
| 414843 | BE386038 | Hs.77492 | heterogeneous nuclear ribonucleoprotein | 1.32 | 1.26 |
| 424058 | AL121516 | Hs.138617 | thyroid hormone receptor interactor 12 | 1.32 | 2.01 |
| 401196 | | | Target Exon | 1.32 | 2.13 |
| 450147 | AW373713 | Hs.146324 | CGI-145 protein | 1.32 | 1.32 |
| 422699 | BE410590 | Hs.119257 | ems1 sequence (mammary tumor and squamou | 1.32 | 1.33 |
| 405172 | | | Target Exon | 1.32 | 2.11 |
| 434087 | AF116675 | Hs.334476 | hypothetical protein PRO1942 | 1.32 | 2.30 |
| 416720 | H05435 | Hs.11110 | hypothetical protein MGC2508 | 1.32 | 2.18 |
| 426621 | NM_001329 | Hs.171391 | C-terminal binding protein 2 | 1.32 | 1.53 |
| 442685 | AB033017 | Hs.8594 | KIAA1191 protein | 1.32 | 1.43 |
| 443879 | Z28462 | Hs.9927 | Homo sapiens mRNA; cDNA DKFZp564D156 (fr | 1.31 | 2.24 |
| 405180 | NM_002649 | | phosphoinositide-3-kinase, catalytic, ga | 1.31 | 1.36 |
| 417365 | D50683 | Hs.82028 | transforming growth factor, beta recepto | 1.31 | 0.98 |
| 402087 | | | Target Exon | 1.31 | 1.31 |
| 429323 | NM_001649 | Hs.2391 | apical protein, Xenopus laevis-like | 1.31 | 2.05 |
| 409935 | AW511413 | Hs.278025 | ESTs | 1.31 | 1.20 |
| 430235 | BE268048 | Hs.236494 | RAB10, member RAS oncogene family | 1.31 | 1.31 |
| 400172 | | | Eos Control | 1.31 | 1.05 |
| 421742 | AW970004 | Hs.107528 | androgen induced protein | 1.31 | 1.79 |
| 404273 | | | Target Exon | 1.31 | 2.35 |
| 416204 | AW972270 | Hs.144054 | ESTs | 1.31 | 2.15 |
| 435076 | AW298113 | Hs.92909 | SON DNA binding protein | 1.31 | 2.05 |
| 452497 | AA732153 | Hs.27865 | Homo sapiens cDNA: FLJ21333 fis, clone C | 1.30 | 1.57 |
| 404596 | | | Target Exon | 1.30 | 2.23 |
| 419080 | AW150835 | Hs.18878 | hypothetical protein FLJ21620 | 1.30 | 1.15 |
| 427195 | W27230 | Hs.173912 | eukaryotic translation initiation factor | 1.30 | 1.34 |
| 438129 | AA778647 | | gb: af87d03.s1 Soares_testis_NHT Homo sap | 1.30 | 2.55 |
| 402138 | | | Target Exon | 1.30 | 2.09 |
| 404029 | | | NM_018936*: Homo sapiens protocadherin be | 1.30 | 2.83 |
| 402731 | AL042818 | | E3 ubiquitin ligase SMURF1 | 1.30 | 3.32 |
| 458766 | AW183618 | Hs.55610 | solute carrier family 30 (zinc transport | 1.30 | 1.56 |
| 434585 | AW451715 | Hs.184075 | ESTs, Weakly similar to ALU1_HUMAN ALU S | 1.30 | 2.73 |
| 417219 | AW973473 | Hs.220936 | ESTs | 1.30 | 2.45 |
| 428125 | AA393071 | Hs.182579 | leucine aminopeptidase | 1.30 | 2.00 |
| 416188 | BE157260 | Hs.79070 | v-myc avian myelocytomatosis viral oncog | 1.30 | 1.00 |
| 444681 | AJ243937 | Hs.288316 | chromosome 6 open reading frame 9 | 1.30 | 0.94 |
| 406621 | X57809 | Hs.181125 | immunoglobulin lambda locus | 1.29 | 1.02 |
| 436663 | AW410458 | Hs.5258 | chromosome 11 open reading frame2 | 1.29 | 1.20 |
| 417250 | N58241 | Hs.332115 | ESTs | 1.29 | 3.43 |
| 434978 | AA321238 | Hs.4310 | eukaryotic translation initiation factor | 1.29 | 1.91 |
| 448079 | R76981 | | thyroid hormone receptor-associated prot | 1.29 | 2.01 |
| 450626 | AW190989 | Hs.1508 | insulin-degrading enzyme | 1.29 | 2.09 |
| 456059 | BE543127 | Hs.336948 | Homo sapiens, clone IMAGE: 3530891, mRNA, | 1.29 | 2.23 |
| 417809 | H75797 | Hs.233550 | zinc finger protein 208 | 1.29 | 2.20 |
| 454771 | AW819939 | Hs.273629 | ESTs | 1.29 | 2.10 |
| 413895 | BE178160 | | gb: RC3-HT0600-060400-022-h10 HT0600 Homo | 1.29 | 2.08 |
| 404649 | | | Target Exon | 1.29 | 1.32 |
| 440676 | NM_004987 | Hs.112378 | LIM and senescent cell antigen-like doma | 1.29 | 2.08 |
| 405891 | | | Target Exon | 1.29 | 2.00 |
| 418965 | AI002238 | Hs.11482 | splicing factor, arginine/serine-rich 11 | 1.29 | 2.41 |
| 412824 | AW958075 | Hs.11261 | small proline-rich protein 2A | 1.29 | 1.27 |
| 420037 | BE299598 | Hs.135569 | hypothetical protein FLJ14708 | 1.29 | 1.23 |
| 459221 | BE246522 | Hs.306121 | leukocyte receptor cluster (LRC) encoded | 1.28 | 2.48 |
| 458651 | AW612481 | Hs.104105 | ESTs | 1.28 | 2.35 |
| 422984 | W28614 | | chorionic somatomammotropin hormone 1 (p | 1.28 | 1.37 |
| 459365 | BE067754 | | gb: MR4-BT0358-140400-006-g10 BT0358 Homo | 1.28 | 1.06 |
| 418254 | AA732511 | Hs.86650 | ESTs | 1.28 | 2.38 |
| 402474 | | | NM_004079: Homo sapiens cathepsin S (CTSS | 1.28 | 1.99 |
| 448456 | AI521830 | Hs.171050 | ESTs | 1.28 | 2.18 |
| 450098 | W27249 | Hs.8109 | hypothetical protein FLJ21080 | 1.28 | 1.68 |
| 405053 | | | Target Exon | 1.28 | 3.23 |
| 428915 | AI041278 | Hs.87908 | Snf2-related CBP activator protein | 1.28 | 4.25 |
| 443721 | AW450451 | Hs.266355 | ESTs | 1.28 | 1.15 |
| 452047 | N35953 | Hs.43510 | ESTs, Weakly similar to BOX B BINDING FA | 1.28 | 2.30 |
| 440213 | AW246253 | Hs.7043 | succinate-CoA ligase, GDP-forming, alpha | 1.28 | 1.19 |
| 452900 | AA626794 | | prothymosin, alpha (gene sequence 28) | 1.28 | 1.27 |
| 418721 | NM_002731 | Hs.87773 | protein kinase, cAMP-dependent, catalyti | 1.28 | 2.76 |
| 458911 | AA373131 | Hs.24322 | ATPase, H transporting, lysosomal (vacuo | 1.28 | 1.21 |
| 444250 | R40815 | Hs.12396 | ESTs, Weakly similar to 2004399A chromos | 1.28 | 2.43 |
| 431631 | AA548906 | Hs.122244 | ESTs | 1.27 | 1.51 |
| 447966 | AA340605 | Hs.105887 | ESTs, Weakly similar to Homolog of rat Z | 1.27 | 3.08 |
| 430316 | NM_000875 | Hs.239176 | insulin-like growth factor 1 receptor | 1.27 | 1.37 |
| 416272 | AA178882 | | gb: zp38b09.r1 Stratagene muscle 937209 H | 1.27 | 2.00 |
| 437456 | AL047045 | Hs.60293 | Homo sapiens clone 122482 unknown mRNA | 1.27 | 3.18 |
| 456327 | H68741 | Hs.38774 | ESTs | 1.27 | 2.35 |
| 403349 | NM_001406 | | ephrin-B3 | 1.27 | 2.28 |
| 428821 | H91282 | Hs.286232 | Homo sapiens cDNA: FLJ23190 fis, clone L | 1.27 | 2.13 |
| 454555 | AW807095 | | gb: MR4-ST0062-040100-024-e02 ST0062 Homo | 1.27 | 2.05 |
| 406872 | AI760903 | | gb: wi09h08.x1 NCI_CGAP_CLL1 Homo sapiens | 1.27 | 1.44 |
| 401720 | | | NM_014587*: Homo sapiens SRY (sex determi | 1.27 | 2.07 |
| 400082 | | | Eos Control | 1.27 | 1.26 |
| 420183 | W92885 | Hs.143408 | ESTs | 1.27 | 2.24 |
| 411579 | AC005258 | Hs.70830 | U6 snRNA-associated Sm-like protein LSm7 | 1.27 | 1.17 |
| 402191 | | | NM_021733*: Homo sapiens testis-specific | 1.27 | 2.44 |
| 457118 | AI245525 | Hs.182469 | Homo sapiens mRNA; cDNA DKFZp564K1972 (f | 1.27 | 2.17 |
| 408576 | NM_003542 | Hs.46423 | H4 histone family, member G | 1.27 | 2.78 |
| 452826 | BE245286 | Hs.301636 | peroxisomal biogenesis factor 6 | 1.27 | 3.15 |
| 414909 | R80316 | Hs.132569 | PP2135 protein | 1.27 | 1.37 |
| 416114 | AI695549 | Hs.183868 | glucuronidase, beta | 1.26 | 2.48 |
| 455476 | AW948172 | | gb: RC0-MT0013-280300-021-b06 MT0013 Homo | 1.26 | 2.18 |
| 445926 | AF054284 | Hs.334826 | splicing factor 3b, subunit 1, 155 kD | 1.26 | 1.35 |
| 432647 | AI807481 | Hs.278581 | fibroblast growth factor receptor 2 (bac | 1.26 | 1.16 |
| 405436 | | | Target Exon | 1.26 | 2.38 |
| 406140 | | | Target Exon | 1.26 | 3.20 |
| 426201 | AW182614 | Hs.128499 | ESTs | 1.26 | 1.17 |
| 433334 | AI927208 | Hs.231958 | matrix metalloproteinase 28 | 1.26 | 2.30 |
| 423262 | NM_005479 | Hs.126057 | frequently rearranged in advanced T-cell | 1.26 | 2.61 |
| 422929 | AA356694 | Hs.94011 | ESTs, Weakly similar to MGB4_HUMAN MELAN | 1.26 | 2.11 |
| 445605 | AI906088 | Hs.87159 | hypothetical protein FLJ12577 | 1.26 | 3.11 |
| 425050 | BE391854 | Hs.7970 | gb: 601285394F1 NIH_MGC_44 Homo sapiens c | 1.26 | 2.18 |
| 420539 | AA282735 | Hs.44004 | AD031 protein | 1.26 | 2.03 |
| 437352 | AL353957 | Hs.284181 | hypothetical protein DKFZp434P0531 | 1.25 | 1.19 |
| 456535 | AA305079 | Hs.1342 | cytochrome c oxidase subunit Vb | 1.25 | 1.18 |
| 434202 | BE382411 | Hs.3764 | guanylate kinase 1 | 1.25 | 1.14 |
| 439528 | BE613180 | Hs.288368 | Homo sapiens cDNA: FLJ21314 fis, clone C | 1.25 | 2.12 |
| 400178 | | | Eos Control | 1.25 | 2.15 |
| 430023 | AA158243 | Hs.227729 | FK506-binding protein 2 (13 kD) | 1.25 | 1.20 |
| 412841 | AI751157 | Hs.101395 | hypothetical protein MGC11352 | 1.25 | 1.39 |
| 425655 | BE614551 | Hs.738 | ribosomal protein L14 | 1.25 | 1.22 |
| 449636 | AI656608 | Hs.281328 | ESTs, Weakly similar to T00378 KIAA0641 | 1.25 | 3.00 |
| 418406 | X73501 | Hs.84905 | cytokeratin 20 | 1.24 | 2.11 |
| 414570 | Y00285 | Hs.76473 | insulin-like growth factor 2 receptor | 1.24 | 1.14 |
| 436967 | AA761729 | Hs.136705 | ESTs | 1.24 | 2.53 |
| 457216 | AA452554 | Hs.283697 | ESTs, Weakly similar to A41796 neural re | 1.24 | 2.18 |
| 418414 | J04977 | Hs.84981 | X-ray repair complementing defective rep | 1.24 | 1.35 |
| 423217 | NM_000094 | Hs.1640 | collagen, type VII, alpha 1 (epidermolys | 1.24 | 0.92 |
| 421733 | AL119671 | Hs.1420 | fibroblast growth factor receptor 3 (ach | 1.24 | 2.71 |
| 402329 | | | NM_006505*: Homo sapiens poliovirus recep | 1.24 | 1.13 |
| 447525 | AF151031 | Hs.300631 | hypothetical protein | 1.24 | 1.07 |
| 445939 | BE018658 | Hs.141003 | Homo sapiens cDNA: FLJ21691 fis, clone C | 1.24 | 2.23 |
| 421936 | AB040884 | Hs.109694 | KIAA1451 protein | 1.24 | 2.15 |
| 433681 | AI004377 | Hs.200360 | Homo sapiens cDNA FLJ13027 fis, clone NT | 1.24 | 2.15 |
| 426717 | N90977 | Hs.49690 | Homo sapiens mRNA; cDNA DKFZp434D2328 (f | 1.24 | 2.14 |
| 404751 | T70445 | | ribosomal protein L9 | 1.24 | 1.30 |
| 411456 | AW847588 | | gb: IL3-CT0213-161299-038-G09 CT0213 Homo | 1.24 | 2.35 |
| 425417 | AF098948 | Hs.157113 | coenzyme Q, 7 (rat, yeast) homolog | 1.24 | 2.88 |
| 434508 | AI648601 | Hs.118012 | ESTs | 1.24 | 2.03 |
| 428284 | AA535762 | Hs.183435 | NM_004545: Homo sapiens NADH dehydrogenas | 1.24 | 1.59 |
| 418597 | AK001678 | Hs.86337 | similar to DNA-directed RNA polymerase I | 1.24 | 2.27 |
| 414191 | AW250089 | Hs.75807 | PDZ and LIM domain 1 (elfin) | 1.24 | 1.53 |
| 449210 | AI635363 | Hs.345517 | ESTs | 1.24 | 2.18 |
| 439551 | W72062 | Hs.11112 | ESTs | 1.24 | 2.13 |
| 426244 | AI064808 | Hs.168289 | saccinate dehydrogenase complex, subunit | 1.23 | 1.06 |
| 453635 | BE148082 | Hs.24724 | MFH-amplified sequences with leucine-ric | 1.23 | 1.34 |
| 429617 | X89984 | Hs.211563 | B-cell CLL/lymphoma 7A | 1.23 | 2.27 |
| 434943 | AI929819 | Hs.92909 | chromosome 21 open reading frame 50 | 1.23 | 2.10 |
| 417010 | NM_006225 | Hs.80776 | phospholipase C, delta 1 | 1.23 | 1.21 |
| 426508 | W23184 | Hs.170171 | glutamate-ammonia ligase (glatamine synt | 1.23 | 1.37 |
| 434055 | AF168712 | Hs.3726 | x 003 protein | 1.23 | 1.58 |
| 438363 | AI886351 | Hs.22353 | hypothetical protein FLJ21952 | 1.23 | 2.44 |
| 450937 | R49131 | Hs.26267 | ATP-dependant interferon response protei | 1.23 | 2.28 |
| 407018 | U49869 | | NM_018955: Homo sapiens ubiquitin B (UBB) | 1.23 | 1.44 |
| 444981 | AW855398 | Hs.12210 | hypothetical protein FLJ13732 similar to | 1.23 | 1.19 |
| 440112 | AA099014 | Hs.231029 | Homo sapiens, clone MGC: 15961, mRNA, com | 1.22 | 2.07 |
| 426672 | AW270555 | Hs.171774 | hypothetical protein | 1.22 | 1.16 |
| 404956 | | | C1003210*: gi\|6912582\|ref\|NP_036524.1\| pe | 1.22 | 2.18 |
| 435088 | NM_000481 | Hs.102 | aminomethyltransferase (glycine cleavage | 1.22 | 1.08 |
| 438588 | AW274454 | Hs.6318 | peroxisomal short-chain alcohol dehydrog | 1.22 | 1.02 |
| 434454 | AF217798 | Hs.3850 | LIS1-interacting protein NUDEL; endoolig | 1.22 | 1.27 |
| 425689 | W16480 | Hs.24283 | ESTs, Moderately similar to reduced expr | 1.22 | 2.52 |
| 428755 | D87454 | Hs.192966 | KIAA0265 protein | 1.22 | 1.16 |
| 420685 | AA279362 | | gb: zs84d04.r1 NCI_CGAP_GCB1 Homo sapiens | 1.22 | 2.75 |
| 458991 | AI743502 | | gb: wf63h12.x2 Soares_NFL_T_GBC_S1 Homo s | 1.22 | 2.39 |
| 414825 | X06370 | Hs.77432 | epidermal growth factor receptor (avian | 1.22 | 1.00 |
| 434023 | AI277883 | Hs.146141 | ESTs | 1.22 | 2.12 |
| 430801 | AI580935 | Hs.105698 | ESTs | 1.22 | 2.53 |
| 414880 | AW247305 | Hs.119140 | eukaryotic translation initiation factor | 1.21 | 1.16 |
| 454144 | BE280478 | Hs.182695 | hypothetical protein MGC3243 | 1.21 | 1.04 |
| 404790 | | | C12001707*: gi\|7305215\|ref\|NP_038599.1\| k | 1.21 | 2.05 |
| 403943 | | | C5000355: gi\|4503225\|ref\|NP_000765.1\| cyt | 1.21 | 2.05 |
| 400201 | | | NM_006156*: Homo sapiens neural precursor | 1.21 | 1.35 |
| 421005 | AW293089 | Hs.33263 | ESTs | 1.21 | 2.02 |
| 414774 | X02419 | Hs.77274 | plasminogen activator, urokinase | 1.21 | 1.11 |
| 400789 | | | C11001367*: gi\|1076205\|pir∥S50754 hypoth | 1.21 | 1.06 |
| 412853 | M34175 | Hs.74626 | adaptor-related protein complex 2, beta | 1.21 | 1.24 |
| 449709 | BE410592 | Hs.23918 | hypothetical protein PP5395 | 1.20 | 1.27 |
| 413726 | AJ278465 | Hs.75510 | annexin A11 | 1.20 | 1.14 |
| 428485 | NM_002950 | Hs.2280 | ribophorin I | 1.20 | 1.24 |
| 405163 | | | C5000561*: gi\|7513700\|pir∥T14151 Inv pro | 1.20 | 1.11 |
| 415887 | NM_003375 | Hs.78902 | voltage-dependent anion channel 2 | 1.20 | 1.16 |
| 434468 | N29309 | Hs.39288 | ESTs | 1.20 | 3.20 |
| 446843 | AW135925 | Hs.98798 | hypothetical protein MGC11332 | 1.20 | 2.25 |
| 432642 | BE297635 | Hs.3069 | heat shock 70 kD protein 9B (mortalin-2) | 1.20 | 2.18 |
| 448242 | R60646 | Hs.20768 | HSPC189 protein | 1.20 | 1.22 |
| 415753 | U52819 | Hs.78781 | vascular endothelial growth factor B | 1.20 | 1.05 |
| 442156 | AI690586 | Hs.29403 | hypothetical protein FLJ22060 | 1.20 | 1.18 |
| 408824 | L80005 | Hs.48375 | small nuclear ribonucleoprotein polypept | 1.20 | 1.45 |
| 430012 | NM_015373 | Hs.227637 | chromosome 22 open reading frame 2 | 1.20 | 1.03 |
| 413392 | AW021404 | Hs.13021 | ESTs | 1.20 | 2.07 |
| 401286 | | | Target Exon | 1.20 | 2.08 |
| 415665 | AI097276 | Hs.274430 | surfeit 6 | 1.20 | 2.53 |
| 456562 | AA306049 | Hs.102669 | DKFZP434O125 protein | 1.20 | 2.40 |
| 408988 | AL119844 | Hs.49476 | Homo sapiens clone TUA8 Cri-du-chat regi | 1.20 | 3.45 |
| 427818 | AW511222 | Hs.193765 | ESTs | 1.19 | 2.99 |
| 406404 | | | NM_002162*: Homo sapiens intercellular ad | 1.19 | 1.17 |
| 400124 | | | Eos Control | 1.19 | 2.12 |
| 416023 | AA173029 | | gb: zp05e01.r1 Stratagene ovarian cancer | 1.19 | 2.45 |
| 427751 | AF000152 | Hs.180669 | conserved gene amplified in osteosarcoma | 1.19 | 1.07 |
| 401204 | | | ENSP00000252232*: Sterol regulatory eleme | 1.19 | 2.40 |
| 446771 | AA128965 | Hs.60679 | TATA box binding protein (TBP)-associate | 1.19 | 2.03 |
| 429673 | AA884407 | Hs.211595 | protein tyrosine phosphatase, non-recept | 1.18 | 2.36 |
| 400130 | | | Eos Control | 1.18 | 2.58 |
| 405365 | | | CX001212*: gi\|7861932\|gb\|AAF70445.1\| (AF2 | 1.18 | 2.38 |
| 406181 | | | Target Exon | 1.18 | 2.18 |
| 422559 | AW247696 | Hs.155839 | hypothetical protein MGC12934 | 1.18 | 2.13 |
| 409524 | AW402151 | Hs.54673 | tumor necrosis factor (ligand) superfami | 1.18 | 1.07 |
| 438446 | AW137476 | Hs.135204 | Homo sapiens cDNA FLJ13884 fis, clone TH | 1.18 | 2.11 |
| 447980 | AI703397 | Hs.202355 | ESTs | 1.18 | 2.02 |
| 425503 | W92517 | Hs.158203 | actin binding LIM protein 1 | 1.18 | 1.29 |
| 411469 | T09997 | Hs.70327 | cysteine-rich protein 2 | 1.18 | 0.99 |
| 409162 | H25530 | Hs.50868 | solute carrier family 22 (organic cation | 1.17 | 1.04 |
| 429986 | AF092047 | Hs.227277 | sine oculis homeobox (Drosophila) homolo | 1.17 | 1.00 |
| 420869 | X58964 | Hs.123638 | regulatory factor X, 1 (influences HLA c | 1.17 | 2.58 |
| 425943 | H46986 | Hs.31861 | ESTs | 1.17 | 2.25 |
| 415376 | R35960 | Hs.180711 | Homo sapiens, Similar to hypothetical pr | 1.17 | 2.13 |
| 420588 | AF000982 | Hs.147916 | DEAD/H (Asp-Glu-Ala-Asp/His) box polypep | 1.17 | 2.38 |
| 457205 | AI905780 | Hs.198272 | Target CAT | 1.17 | 1.11 |
| 407970 | AW403814 | Hs.41714 | BCL2-associated athanogene | 1.16 | 3.60 |
| 440214 | AA247118 | Hs.7049 | hypothetical protein FLJ11305 | 1.16 | 2.15 |
| 405646 | | | C12000200: gi\|4557225\|ref\|NP_000005.1\| al | 1.16 | 1.11 |
| 438438 | AA257992 | Hs.50651 | Janus kinase 1 (a protein tyrosine kinas | 1.16 | 1.08 |
| 431427 | AK000401 | Hs.252748 | Homo sapiens cDNA FLJ20394 fis, clone KA | 1.16 | 2.08 |
| 419885 | AA251561 | Hs.48689 | ESTs | 1.16 | 2.07 |
| 427679 | AA973904 | Hs.176092 | ESTs, Moderately similar to MYPH_HUMAN M | 1.16 | 2.15 |
| 443865 | AW296385 | Hs.146139 | hypothetical protein FLJ12610 | 1.15 | 2.05 |
| 415511 | AI732617 | Hs.182362 | ESTs | 1.15 | 3.44 |
| 417988 | AA210878 | Hs.111219 | ESTs, Moderately similar to ALU1_HUMAN A | 1.15 | 2.09 |
| 405058 | | | Target Exon | 1.15 | 1.16 |
| 446623 | AF279865 | Hs.15711 | kinesin family member 13B | 1.15 | 1.21 |
| 419754 | H52299 | Hs.308467 | Homo sapiens mRNA; cDNA DKFZp58610523 (f | 1.15 | 1.15 |
| 420003 | AA256906 | Hs.111364 | ESTs, Weakly similar to ubiquitous TPR m | 1.15 | 2.06 |
| 422988 | AW673847 | Hs.97321 | ESTs | 1.15 | 1.00 |
| 426371 | M63967 | Hs.169517 | aldehyde dehydrogenase 1 family, member | 1.15 | 2.31 |
| 422895 | NM_015958 | | CGI-30 protein | 1.15 | 2.08 |
| 426295 | AW367283 | Hs.278270 | zinc finger protein 6 (CMPX1) | 1.15 | 2.13 |
| 448323 | AI492298 | Hs.170915 | ESTs | 1.14 | 2.54 |
| 414244 | AA287801 | Hs.71711 | ESTs, Moderately similar to Z195_HUMAN Z | 1.14 | 2.23 |
| 442872 | AI471987 | Hs.173045 | ESTs | 1.14 | 2.09 |
| 425318 | AU076845 | Hs.155596 | BCL2/adenovirus E1B 19 kD-interacting pro | 1.14 | 2.33 |
| 415667 | F11582 | Hs.78582 | developmentally regulated GTP-binding pr | 1.14 | 1.10 |
| 401058 | | | Target Exon | 1.14 | 2.20 |
| 409838 | AW502928 | | gb: UI-HF-BP0p-aiw-e-10-0-UI.r1 NIH_MGC_5 | 1.14 | 2.15 |
| 438493 | AI130740 | Hs.6241 | phosphoinositide-3-kinase, regulatory su | 1.14 | 1.00 |
| 404392 | | | C7001460: gi\|12667420\|gb\|AAK01436.1\|AF332 | 1.14 | 2.82 |
| 433220 | AI076192 | Hs.131933 | ESTs | 1.14 | 2.78 |
| 405166 | | | Target Exon | 1.14 | 2.23 |
| 401038 | | | C11000425: gi\|4507721\|ref\|NP_003310.1\| ti | 1.14 | 2.71 |
| 414052 | AW578849 | Hs.283552 | ESTs, Weakly similar to unnamed protein | 1.14 | 2.08 |
| 442043 | BE567620 | Hs.99210 | ESTs | 1.13 | 2.17 |
| 419727 | AW160796 | Hs.92700 | DKFZP564O243 protein | 1.13 | 1.14 |
| 425206 | NM_002153 | Hs.155109 | hydroxysteroid (17-beta) dehydrogenase 2 | 1.13 | 2.07 |
| 414682 | AL021154 | Hs.76884 | inhibitor of DNA binding 3, dominant neg | 1.13 | 1.47 |
| 402712 | | | C1003562*: gi\|10047177\|dbj\|BAB13382.1\| (A | 1.13 | 1.18 |
| 452289 | BE568205 | Hs.28827 | mitogen-activated protein kinase kinase | 1.12 | 2.16 |
| 401496 | | | Target Exon | 1.12 | 1.10 |
| 459249 | AI970399 | Hs.240079 | ESTs | 1.12 | 2.67 |
| 447495 | AW401864 | Hs.18720 | programmed cell death 8 (apoptosis-induc | 1.12 | 2.03 |
| 428422 | AI557280 | Hs.184270 | capping protein (actin filament) muscle | 1.11 | 2.60 |
| 421762 | AA297546 | | gb: EST113074 Fetal brain III Homo sapien | 1.11 | 2.15 |
| 405855 | | | Target Exon | 1.11 | 1.98 |
| 428972 | AK001470 | Hs.194692 | cysteine desulfurase | 1.11 | 2.19 |
| 406761 | AI241715 | Hs.77039 | ATP synthase, H transporting, mitochondr | 1.10 | 3.33 |
| 432425 | AF070619 | Hs.274539 | Homo sapiens clone 24481 mRNA sequence | 1.10 | 2.30 |
| 446241 | AI004677 | Hs.179260 | chromosome 14 open reading frame 4 | 1.10 | 2.28 |
| 424454 | AB011139 | Hs.147946 | optic atrophy 1 (autosomal dominant) | 1.10 | 2.18 |
| 418242 | AW976183 | Hs.88414 | BTB and CNC homology 1, basic leucine zi | 1.10 | 2.07 |
| 437407 | AI479332 | Hs.129031 | ESTs | 1.10 | 2.09 |
| 447459 | AI380255 | Hs.159424 | ESTs | 1.10 | 2.22 |
| 426682 | AV660038 | Hs.2056 | UDP glyconyltransferase 1 family, polype | 1.09 | 2.33 |
| 403655 | | | NM_003071: Homo sapiens SWI/SNF related, | 1.09 | 2.25 |
| 433156 | R59206 | Hs.17519 | Homo sapiens cDNA: FLJ22539 fis, clone H | 1.09 | 2.70 |
| 403826 | | | Target Exon | 1.09 | 1.10 |
| 433333 | AI016521 | Hs.71816 | v-akt murine thymoma viral oncogene homo | 1.09 | 1.06 |
| 451382 | H86180 | Hs.221513 | ESTs | 1.08 | 2.75 |
| 454717 | AW815123 | | gb: QV4-ST0212-261199-045-b01 ST0212 Homo | 1.08 | 1.98 |
| 422743 | BE304678 | Hs.119598 | ribosomal protein L3 | 1.08 | 1.00 |
| 411672 | AJ275986 | Hs.71414 | transcription factor (SMIF gene) | 1.08 | 1.00 |
| 452748 | AB011128 | Hs.30512 | Homo sapiens mRNA for KIAA0556 protein, | 1.08 | 2.45 |
| 428330 | L22524 | Hs.2256 | matrix metalloproteinase 7 (matrilysin, | 1.08 | 2.15 |
| 447703 | AI420277 | | gb: tf06c12.x1 NCI_CGAP_Pr28 Homo sapiens | 1.08 | 2.05 |
| 452420 | BE564871 | Hs.29463 | centrin, EF-hand protein, 3 (CDC31 yeast | 1.07 | 2.03 |
| 455234 | R41084 | | gb: Hk763-f Adult heart, Clontech Homo sa | 1.07 | 2.08 |
| 413945 | NM_000591 | Hs.75627 | CD14 antigen | 1.07 | 0.91 |
| 417333 | AL157545 | Hs.173179 | bromodomain and PHD finger containing, 3 | 1.07 | 1.00 |
| 434105 | AW952124 | Hs.13094 | presenilins associated rhomboid-like pro | 1.07 | 1.11 |
| 455630 | AV655701 | Hs.75183 | cytochrome P450, subfamily IIE (ethanol- | 1.06 | 2.14 |
| 455424 | AW937733 | | gb: QV3-DT0045-210100-063-d06 DT0045 Homo | 1.05 | 2.03 |
| 438324 | AI792660 | Hs.6162 | KIAA0771 protein | 1.05 | 2.27 |
| 421604 | AW293880 | Hs.248367 | MEGF11 protein | 1.05 | 2.00 |
| 422614 | AI908006 | Hs.295362 | Homo sapiens cDNA FLJ14459 fis, clone HE | 1.04 | 2.33 |
| 404058 | | | Target Exon | 1.04 | 2.10 |
| 453085 | AW954243 | | KIAA0251 protein | 1.04 | 2.18 |
| 417500 | H59970 | | gb: yr16f04.r1 Soares fetal liver spleen | 1.04 | 2.40 |
| 408653 | AW410189 | Hs.98074 | itchy (mouse homolog) E3 ubiquitin prote | 1.04 | 2.73 |
| 440439 | N92818 | Hs.64754 | ESTs, Weakly similar to potential CDS [H | 1.04 | 2.05 |
| 409209 | AA460160 | Hs.73217 | ESTs | 1.04 | 2.73 |
| 456107 | AA160000 | Hs.137396 | ESTs, Weakly similar to JC5238 galactosy | 1.03 | 2.18 |
| 415403 | F07923 | Hs.26744 | ESTs | 1.02 | 2.43 |
| 455591 | BE008018 | | gb: QV0-BN0147-290400-214-c01 BN0147 Homo | 1.02 | 2.08 |
| 428491 | AF091035 | Hs.184627 | KIAA0118 protein | 1.02 | 2.81 |
| 407788 | BE514982 | Hs.38991 | S100 calcium-binding protein A2 | 1.02 | 2.11 |
| 434540 | NM_016045 | Hs.3945 | CGI-107 protein | 1.02 | 2.78 |
| 442174 | AI690080 | Hs.128907 | ESTs, Weakly similar to ARIX homeodomain | 1.02 | 2.05 |
| 413431 | AW246428 | Hs.75355 | ubiquitin-conjugating enzyme E2N (homolo | 1.02 | 1.00 |
| 452436 | BE077546 | Hs.31447 | ESTs, Moderately similar to A46010 X-lin | 1.02 | 2.25 |
| 454412 | AW582568 | | gb: RC1-ST0278-080100-011-h04 ST0278 Homo | 1.00 | 2.20 |
| 426955 | AA393669 | Hs.238094 | ESTs | 1.00 | 2.18 |
| 425910 | AA830797 | Hs.184760 | CCAAT-box-binding transcription factor | 1.00 | 2.10 |
| 405710 | | | CX000682: gi\|12741327\|ref\|XP_008833.2\| zi | 1.00 | 2.00 |
| 400296 | AA305627 | Hs.139336 | ATP-binding cassette, sub-family C (CFTR | 1.00 | 1.00 |
| 402001 | | | Target Exon | 1.00 | 1.00 |
| 402812 | | | NM_004930*: Homo sapiens capping protein | 1.00 | 1.00 |
| 402892 | | | Target Exon | 1.00 | 1.00 |
| 403329 | | | Target Exon | 1.00 | 1.00 |
| 407202 | N58172 | Hs.109370 | ESTs | 1.00 | 1.00 |
| 408684 | R61377 | Hs.12727 | hypothetical protein FLJ21610 | 1.00 | 1.00 |
| 410555 | U92649 | Hs.64311 | a disintegrin and metalloproteinase doma | 1.00 | 1.00 |
| 413573 | AI733859 | Hs.149089 | ESTs | 1.00 | 1.00 |
| 414343 | AL036166 | Hs.323378 | coated vesicle membrane protein | 1.00 | 1.00 |
| 414422 | AA147224 | Hs.249195 | Homeo box A13 | 1.00 | 1.00 |
| 417006 | AW673606 | Hs.80758 | aspartyl-tRNA synthetase | 1.00 | 1.00 |
| 421577 | BE465451 | Hs.105925 | single-minded (Drosophila) homolog 1 | 1.00 | 1.00 |
| 423349 | AF010258 | Hs.127428 | homeo box A9 | 1.00 | 1.00 |
| 424273 | W40460 | Hs.144442 | phospholipase A2, group X | 1.00 | 1.00 |
| 424649 | BE242035 | Hs.151461 | embryonic ectoderm development | 1.00 | 1.00 |
| 426827 | AW067805 | Hs.172665 | methylenetetrahydrofolate dehydrogenase | 1.00 | 1.00 |
| 427308 | D26067 | Hs.174905 | KIAA0033 protein | 1.00 | 1.00 |
| 429597 | NM_003816 | Hs.2442 | a disintegrin and metalloproteinase doma | 1.00 | 1.00 |
| 430261 | AA305127 | Hs.237225 | hypothetical protein HT023 | 1.00 | 1.00 |
| 431078 | U82827 | Hs.249195 | homeo box A13 | 1.00 | 1.00 |
| 433222 | AW514472 | Hs.238415 | dickkopf (Xenopus laevis) homolog 4 | 1.00 | 1.00 |
| 434980 | AW770553 | Hs.14553 | sterol O-acyltransferase (acyl-Coenzyme | 1.00 | 1.00 |
| 435974 | U29690 | Hs.37744 | Homo sapiens beta-1 adrenergic receptor | 1.00 | 1.00 |
| 443054 | AI745185 | Hs.8939 | yes-associated protein 65 kDa | 1.00 | 1.00 |
| 443564 | AI921685 | Hs.199713 | ESTs | 1.00 | 1.00 |
| 444542 | AI161293 | Hs.280380 | aminopeptidase | 1.00 | 1.00 |
| 445413 | AA151342 | Hs.12677 | CGI-147 protein | 1.00 | 1.00 |
| 448706 | AW291095 | Hs.21814 | interleukin 20 receptor, alpha | 1.00 | 1.00 |
| 448807 | AI571940 | Hs.7549 | ESTs | 1.00 | 1.00 |
| 449448 | D60730 | Hs.57471 | ESTs | 1.00 | 1.00 |
| 449517 | AW500106 | Hs.23643 | serine/threonine protein kinase MASK | 1.00 | 1.00 |
| 450568 | AL050078 | Hs.25159 | Homo sapiens cDNA FLJ10784 fis, clone NT | 1.00 | 1.00 |
| 451844 | T61430 | | gb: yc06a03.s1 Stratagene lung (937210) H | 1.00 | 1.00 |
| 452039 | AI922988 | Hs.172510 | ESTs | 1.00 | 1.00 |
| 452795 | AW392555 | Hs.18878 | hypothetical protein FLJ21620 | 1.00 | 1.00 |
| 453096 | AW294631 | Hs.11325 | ESTs | 1.00 | 1.00 |
| 453370 | AI470523 | Hs.139336 | ATP-binding cassette, sub-family C (CFTR | 1.00 | 1.00 |
| 453966 | BE148734 | Hs.63325 | transmembrane protease, serine 4 | 1.00 | 1.00 |
| 405580 | | | Target Exon | 1.00 | 1.00 |
| 430268 | AK000737 | Hs.237480 | hypothetical protein FLJ20730 | 1.00 | 1.00 |
| 450377 | AB033091 | Hs.74313 | KIAA1265 protein | 1.00 | 1.00 |
| 433226 | AW503733 | Hs.9414 | KIAA1488 protein | 1.00 | 1.00 |
| 412719 | AW016610 | Hs.816 | ESTs | 1.00 | 1.00 |
| 425289 | AW139342 | Hs.155530 | interferon, gamma-inducible protein 16 | 1.00 | 1.00 |
| 446921 | AB012113 | Hs.16530 | small inducible cytokine subfamily A (Cy | 1.00 | 1.00 |
| 439706 | AW872527 | Hs.59761 | ESTs, Weakly similar to DAP1_HUMAN DEATH | 1.00 | 1.00 |
| 438817 | AI023799 | Hs.163242 | ESTs | 1.00 | 1.00 |
| 455474 | AW948094 | | gb: RC0-MT0012-290300-031-c10 MT0012 Homo | 0.99 | 2.00 |
| 420148 | U34227 | Hs.95361 | myosin VIIA (Usher syndrome 1B (autosoma | 0.99 | 2.33 |
| 428466 | AF151063 | Hs.184456 | hypothetical protein | 0.98 | 2.20 |
| 421594 | R45689 | Hs.21889 | Homo sapiens cDNA FLJ12978 fis, clone NT | 0.98 | 3.09 |
| 444654 | AV650572 | Hs.23440 | KIAA1105 protein | 0.98 | 2.00 |
| 409759 | N40285 | Hs.81182 | histamine N-methyltransferase | 0.97 | 2.20 |
| 401936 | | | Target Exon | 0.97 | 2.39 |
| 403463 | | | Target Exon | 0.96 | 2.58 |
| 434421 | AI915927 | Hs.34771 | ESTs | 0.96 | 2.15 |
| 412636 | NM_004415 | | desmoplakin (DPI, DPII) | 0.95 | 2.01 |
| 442432 | BE093589 | Hs.38178 | hypothetical protein FLJ23468 | 0.93 | 2.55 |
| 421938 | AA405951 | | gb: zu66c01.r1 Soares_testis_NHT Homo sap | 0.93 | 3.10 |
| 447470 | BE618324 | Hs.263561 | ESTs, Weakly similar to A53531 oncofetal | 0.92 | 2.08 |
| 448369 | AW268962 | Hs.111335 | ESTs | 0.91 | 2.35 |
| 421710 | AB007930 | Hs.107088 | KIAA0461 protein | 0.91 | 2.63 |
| 406805 | AI686003 | Hs.296031 | ESTs | 0.91 | 2.21 |
| 447475 | AI380797 | Hs.158992 | ESTs | 0.90 | 3.25 |
| 428892 | U82828 | Hs.194382 | ataxia telangiectasia mutated (includes | 0.90 | 2.02 |
| 450222 | U75308 | Hs.24644 | TATA box binding protein (TBP)-associate | 0.89 | 2.73 |
| 401572 | | | C15001384*: gi\|12737057\|ref\|XP_012129.1\| | 0.88 | 2.00 |
| 429226 | AA913330 | Hs.53542 | choreoacanthocytosis gene; KIAA0986 prot | 0.88 | 2.37 |
| 421979 | AW062518 | Hs.233150 | hypothetical protein MGC5560 | 0.87 | 3.70 |
| 407614 | NM_001932 | Hs.37144 | membrane protein, palmitoylated 3 (MAGUK | 0.86 | 2.02 |
| 417912 | R25269 | Hs.50547 | ESTs | 0.86 | 2.00 |
| 401654 | | | NM_007242: Homo sapiens DEAD/H (Asp-Glu-A | 0.86 | 2.11 |
| 403149 | | | NM_001450: Homo sapiens four and a half L | 0.86 | 2.19 |
| 413000 | BE046280 | | gb: hn43c09.x2 NCI_CGAP_RDF2 Homo sapiens | 0.85 | 2.40 |
| 425166 | AK001456 | Hs.154919 | KIAA0625 protein | 0.85 | 2.18 |
| 447371 | AA334274 | Hs.18368 | DKFZP564B0769 protein | 0.84 | 2.13 |
| 452801 | AI935587 | Hs.34447 | ESTs | 0.84 | 2.55 |
| 400957 | | | Target Exon | 0.83 | 2.15 |
| 426420 | BE383808 | Hs.322430 | NDRG family, member 4 | 0.83 | 2.14 |
| 429354 | AA451666 | Hs.269363 | ESTs | 0.80 | 2.25 |
| 417831 | H16423 | Hs.82685 | CD47 antigen (Rh-related antigen, integr | 0.78 | 2.43 |
| 443368 | BE568891 | Hs.199210 | ESTs, Moderately similar to bK116F5.2[H | 0.78 | 2.00 |
| 441901 | AI914445 | Hs.128103 | ESTs | 0.76 | 2.06 |
| 429462 | AI890356 | Hs.127804 | Homo sapiens, clone IMAGE: 3536432, mRNA, | 0.76 | 2.03 |
| 403010 | | | C21000152: gi\|6226483\|sp\|Q52118\|YMO3_ERWS | 0.75 | 2.43 |
| 420344 | BE463721 | Hs.97101 | putative G protein-coupled receptor | 0.75 | 2.42 |
| 448332 | AW293110 | Hs.171068 | ESTs | 0.74 | 2.00 |
| 421674 | T10707 | Hs.296355 | hypothetical protein FLJ23138 | 0.71 | 2.18 |
| 450645 | AL117441 | Hs.301997 | hypothetical protein FLJ13033 | 0.67 | 2.06 |
| 448514 | AB020626 | Hs.301866 | KIAA0819 protein | 0.67 | 2.03 |
| 431609 | AW792792 | Hs.264330 | N-acylsphingosine amidohydrolase (acid c | 0.60 | 2.54 |
| 417512 | X76534 | Hs.82226 | glycoprotein (transmembrane) nmb | 0.60 | 2.00 |
| 425960 | AW410646 | Hs.164649 | hypothetical protein DKFZp434H247 | 0.57 | 2.15 |
| 408077 | AL133574 | Hs.42458 | Homo sapiens mRNA; cDNA DKFZp586C1817 (f | 0.53 | 2.29 |

Pkey: Unique Eos probeset identifier number
ExAccn: Exemplar Accession number, Genbank accession number
UnigeneID: Unigene number
Unigene Title: Unigene gene title
R1 80th percentile of Ta or T1 tumor Als from patients who did not upstage divided by the 80th percentile of Ta or T1 tumor Als from patients who did upstage
R2 median of Ta or T1 tumor Als from patients who did not upstage divided by the median of Ta or T1 tumor Als from patients who upstaged

[0386] TABLE 9B

| Pkey | CAT Number | Accession |
|---|---|---|
| 409345 | 112147_1 | AI949109 AW118631 AI833148 AW117891 R45932 R80970 AA733110 AW269428 T27024 |
| | | R97693 AI149202 AI475492 H98845 AA609665 AI125598 AW663742 AI140029 AW103164 AA126862 N66829 W65398 |
| | | H94509 W65300 R07712 R36955 AA812477 AA609576 AI754304 Z41075 AA970004 AW274661 AA923584 AI673108 |
| | | AA070706 AA541812 T90938 |
| 409540 | 1138613_1 | AW409569 BE297044 BE295828 |
| 409806 | 1155259_1 | AW500960 AW501280 AW500814 |
| 409838 | 1155987_1 | AW502928 AW505606 AW501576 AW501577 |
| 409844 | 1156139_1 | AW502336 AW502339 AW501736 AW501839 |
| 409855 | 1156256_1 | AW502461 AW503000 AW502207 AW501862 |
| 409865 | 1156518_1 | AW502208 AW502366 AW502148 |
| 410600 | 121108_1 | AW575742 BE549623 AI335824 BE463447 AA729043 AW408712 AW499616 AA086179 |
| | | AW499617 AA191322 |
| 410846 | 1223902_1 | AW807057 AW807054 AW807189 AW807193 AW807369 AW807429 AW807364 |
| | | AW807365 AW807078 AW807256 AW807180 AW807331 |
| 410946 | 1227589_1 | AW811502 AW811521 AW811548 AW811471 AW811511 AW811508 |
| 411456 | 1246706_1 | AW847588 AW847716 AW847664 AW847592 |
| 411609 | 1251530_1 | AW993680 AW853769 |
| 412210 | 1283615_1 | AW901492 AW947725 AW901448 |
| 412383 | 1292509_1 | AW947577 AW947574 AW947576 AW947734 AW947733 AW947732 |
| 412560 | 130601_1 | R24601 R23657 AA194467 AI948584 AI678666 AA194383 AI765219 AA702993 AA813511 |
| | | AA620965 AI990303 AI624882 AI003925 AI338870 AI004689 AI004690 AI127228 Z25302 F29302 BE044308 F32992 |
| | | AA112966 T30825 F24958 F18071 C00537 T30841 R24502 AI934786 AI770075 AI144132 AA812597 AW203978 |
| | | H82735 AI813349 AI1142908 C04894 AI208243 AI208044 N89963 AI767866 AI290470 AI865963 H83611 BE463806 |
| | | AI082639 AA507760 |
| 412636 | 13165_1 | NM_004415 AL031058 M77830 BE149760 AW752599 AW848723 AW376697 |
| | | AW376817 AW376699 AW848371 AW376782 AW848789 AW361413 AW849074 AW997139 AW799304 AW799309 |
| | | BE077020 BE077017 BE185187 AW997196 BE156621 BE179915 BE006561 BE143155 AW890985 BE002107 |
| | | AW103521 AA857316 AW383133 BE011378 AW170253 BE185750 AW886475 BE160433 J05211 BE082576 |
| | | BE082584 BE004047 AW607238 AW377700 AW377699 BE082526 BE082505 BE082507 BE082514 AW178000 |
| | | AW177933 AI905935 AW747877 AW748114 BE148516 AW265328 AW847678 AW847688 AW365151 AW365148 |
| | | AW365153 AW365156 AW365175 AW365157 AW365154 AW068840 BE005272 AW365145 BE001925 BE182166 |
| | | BE144243 BE001923 AI951766 AI434518 BE184920 BE184933 AI284090 BE184941 AW804674 BE184924 |
| | | C04715 W39488 AW995615 BE184948 BE159646 AW606653 AA099891 AA131128 AA337270 AA340777 |
| | | AW384371 AA852212 R58704 AW366566 AW364859 AA025851 AA025852 AA455100 AA719958 AW352220 |
| | | AW996245 BE165351 BE073467 AA377127 AW890264 AW609750 AW391912 AW849690 T87267 AW853812 |
| | | AA852213 W74149 BE009090 AA056401 H91011 AW368529 AW390272 C18467 AW674920 N57176 AA026480 |
| | | AW576767 H93284 AA026863 AW177787 AA026654 AW177786 BE092134 BE092137 BE092136 AW177784 |
| | | AI022862 BE091653 AW376811 AW848592 AA040018 BE185331 BE182164 AA368564 AW951576 T29918 |
| | | AA131077 W95048 W25458 AW205789 H90899 N29754 W32490 R20904 BE167181 BE167165 N84767 |
| | | H27408 H30146 AI190590 C03378 AI554403 AI205263 AA128470 AI392926 AF139065 AW370813 AW370827 |
| | | AW798417 AW798780 AW798883 AW798569 R33557 AA149190 C03029 AW177783 AA088866 AW370829 |
| | | AA247685 BE002273 AI760816 AI439101 AW879451 AI700963 AA451923 AI340326 AI590975 T48793 AI568096 |
| | | AI142882 AA039975 AI470146 AA946936 BE067737 BE067786 W19287 AA644381 AA702424 AI417612 AI306554 |
| | | AI686869 AI568892 AW190555 AI571075 AI220573 AA056527 AI471874 AI304772 AW517828 AI915596 AI627383 |
| | | AI270345 AW021347 AW166807 AW105614 AI346078 AA552300 W95070 AI494069 AI911702 AA149191 AA026864 |
| | | AI830049 AI887258 AW780435 AI910434 AI819984 AI858282 AI078449 AI025932 AI860584 AI635878 AA026047 |
| | | AA703232 D12062 AW192085 AA658154 AW514597 AW591892 T87181 AA782066 AW243815 AW150038 |
| | | AW268383 AW004633 AI927207 AA782109 AW473233 AI804485 AW169216 AI572669 AA602182 AW015480 |
| | | AW771865 AI270027 AA961816 AA283207 AI076962 AI498487 AI348053 AI783914 H44405 AW799118 AA128330 |
| | | AA515500 AA918281 W02156 AI905927 AA022701 W38382 R20795 T77861 AW860878 |
| 412998 | 1343218_1 | BE046254 BE046673 BE046253 |
| 413000 | 1343239_1 | BE046280 BE046763 BE046676 |
| 413611 | 1380017_1 | BE153275 BE153189 BE153329 BE153022 BE153030 BE152974 |
| 413709 | 1384144_1 | BE158687 BE158688 |
| 413804 | 1390710_1 | T64682 BE168190 BE168256 |
| 413895 | 1397743_1 | BE178160 BE177986 BE178330 BE178480 |
| 415789 | 1555357_1 | H01581 H12850 R65905 H13053 |
| 416023 | 156696_1 | AA173029 BE467711 AA176710 |
| 416272 | 158407_1 | AA178882 AA179898 AA178897 |
| 417500 | 168443_1 | H59970 AA203382 R08822 |
| 419555 | 185884_1 | AA244416 AA244401 |
| 420685 | 195591_1 | AA279362 AA454496 AA584871 |
| 421762 | 206590_1 | AA297546 AA297410 AA297401 AA297465 AA297268 AW966174 |
| 421938 | 209376_1 | AA405951 AA300675 AA412243 AA412383 |
| 422895 | 22276_1 | NM_015958 AF132964 AA088658 N28882 AI197842 AA338679 AA405666 W16871 |
| | | AA385447 AI928315 AI928318 AW846613 AW960009 AI860687 AI206534 AI961336 T64873 AI735559 H58826 |
| | | AA857710 AW337576 BE242131 AA339340 AA371380 AA334618 AA316398 R96579 AW771996 AA366110 W07461 |
| | | H77948 |
| 422984 | 223488_3 | W28614 W27435 AI983043 AA364395 AW572472 AW190386 AI129278 AI913081 AW473549 |
| | | AA830713 AI982871 AI638647 AI828466 AW572486 N52583 N89687 AW075567 AI571047 AI887479 AI559469 |
| | | AI685802 AA805256 AI458777 AA974369 AI866929 AI886032 AI823925 AI823566 AW198135 AI287510 |
| | | AI565910 AA765775 AI866019 AI263697 AI355825 R42668 AA894603 AW105585 AI824555 |
| | | AW339175 D20479 |
| 432638 | 35173_4 | AI017717 AA349996 AA350286 BE501310 R48207 AI372769 AJ003450 AA915976 AI261513 |
| | | AI033019 AI222825 AW150983 AA420700 AA420670 AW884784 Z40157 |
| 433821 | 374566_1 | AW182416 AA918195 AA778707 AA927922 AA868718 AA853991 AA609856 AA634398 |
| 434767 | 39297_1 | AF153201 AW888811 AW888810 AW842970 AA383181 F35832 F26805 |
| | | X78930 AF026094 N83362 AA206766 AW874294 AA284205 AI091885 AA206800 AW370684 |
| | | AA904608 AA806352 AA894757 AW068376 AA807284 AA311341 AW958314 |
| 434809 | 393566_1 | AW974687 AA649656 AA652145 |
| 438129 | 450500_1 | AA778647 AW070999 R42302 |
| 438713 | 463722_1 | H16902 AA814856 T65225 AI523569 F09869 F04737 AI538427 AI051714 AW172603 F02602 |
| | | F01437 AI684417 AI801950 F02970 Z39367 F02882 T16704 H14597 AW952332 R52080 H10427 T06175 |
| | | T31057 AI381431 R60918 R41255 R43059 R39905 H19330 R36968 |
| 438924 | 4669_1 | BE535511 M62098 AA306787 AW891766 AA348998 AA338869 AA344013 AW956561 AW389343 |
| | | AW403607 L40391 AW408435 AA121738 AI568978 H13317 R20373 AW948724 AW948744 AA335023 |
| | | AA436722 AA448690 C21404 AW884390 AA345454 AA303292 AA174174 BE092290 T90614 AA035104 |
| | | R76028 AA126924 AA741086 AW022056 AW118940 AA121666 AI832409 AA683475 AI140901 AI623576 |
| | | AW519064 AW474125 AI953923 AI735349 AW150109 AI436154 AW118130 AW270782 AI804073 N27434 |
| | | AA876543 AA937815 AI051166 AA505378 AI041975 AI335355 AI089540 AA662243 AI127912 AI925604 |
| | | AI250880 AI366874 AI564386 AI815196 AI683526 AI435885 AI160934 H79030 AI801493 |
| | | AA448691 AI673767 AI076042 AI804327 AA813438 AA680002 AI274492 T16177 AI287337 AI935050 |
| | | AA907805 AA911493 AI589411 AI371358 AW576236 AI078866 AW516168 AA346372 AI560185 |
| | | AA471009 R75857 AA296025 AA523155 AA853168 AI696593 AI658482 AI566601 AW072797 |
| | | AA128047 AA035502 AW243274 AA992517 R43760 |
| 439004 | 467743_1 | AW979062 AA848000 AA847968 AA829138 |
| 441623 | 52182_1 | AA315805 AA376906 BE539395 AW579186 H44349 BE328145 BE041644 AW579187 AW366504 |
| | | H28241 H25318 W37573 AW600919 AA528775 R75904 AW780125 AA149420 AI672414 AI122760 |
| | | AA345675 AW172758 AI337912 AI961291 AW090300 AI090244 BE219837 AI623661 BE501576 |
| | | AI742232 AW887496 BE501734 AI023964 AI288904 AA975373 AA890325 AI458424 AI984583 |
| | | N32562 AI358102 AW241694 AI038448 AA576391 AI018389 AI672071 AA977874 |
| | | W37448 AW189392 AA612894 AI373653 H89551 H89365 AI699774 AI277548 |
| 442473 | 543413_1 | W27992 AF056988 |
| 442506 | 54405_1 | BE566411 AL121194 AW976385 AW366882 AI767324 |
| 445182 | 632151_1 | AW189787 AI215430 AW268499 AW205930 AI392907 BE093017 BE093019 BE093010 |
| 447703 | 733191_1 | AI420277 AW747989 W26565 |
| 448079 | 74834_1 | R76981 AA101801 AA101722 AA122297 AA098802 BE006483 AA343200 AW963375 BE090425 |
| | | AA213871 BE621402 AA309094 AW960171 AI275045 Z44230 AW243724 AI051487 AI376624 |
| | | R68631 AW978550 C00116 AI984051 AA122265 AI379941 AW205843 AW205839 AW190219 |
| | | AW129532 AI954133 AI668869 AI383948 AI537386 AA213788 AI088416 AI360826 AA101802 |
| | | AI619505 AA101795 AA101723 AW614392 R64287 AA927599 AI251904 AI803003 AI675123 |
| | | AW023079 AW134959 AI926156 AA831069 AI638324 F29901 R46085 F03383 C17731 R20584 |
| | | T90131 |
| 450936 | 85190_2 | AI033745 AI034133 AA844424 AW166024 AI831699 AI971097 AA011685 H70852 H70851 |
| 451844 | 888230_1 | T61430 AI820546 AI821336 |
| 452900 | 93691_1 | AA626794 AA626779 AA071274 AA928041 AI954235 N71035 N70230 AW674412 AI871136 AI563955 |
| | | AI954237 AA649543 AI340231 AI368586 AI868721 W44486 T83736 AA126250 AI343619 H94297 |
| | | T47633 AI672897 AA496355 R23240 AI814680 AA902119 AA644262 N67040 AW074273 AI357512 |
| | | AA865354 AI027942 R33837 H95828 N63928 AI418701 AI186469 AA693672 AA778429 AA128352 |
| | | AW954072 C00015 AA861853 AW022016 AI955645 AI753118 AI755095 AA029523 T70086 |
| | | AA029458 AW675640 N79606 AI659597 AI417119 AI804089 AI383091 AA128493 T83907 T47632 |
| | | AA094118 AA496405 H94191 AW887759 N98454 AA512988 AI623761 AW028373 AW249740 |
| | | AI187029 AA991733 AI683085 AI336036 D60550 D60466 D60009 D60248 AW262673 AI524080 |
| | | AA205643 AI969141 AW674989 AA093704 R81248 R73069 W01019 R23316 C14688 |
| | | W44485 AA093663 T70157 H57883 R94790 D81287 D81788 AA364340 AA383533 |
| | | N41706 BE295144 D60973 D81466 D60551 R33836 D60249 AA354560 W01933 T71478 |
| | | AA515461 F27984 BE084745 W19084 R81247 AI080252 AI382863 AA205642 |
| 453085 | 94851_1 | AW954243 AA829930 AA412478 AA828434 AA814538 AI927418 AI192435 W52897 AA443666 AA031913 |
| | | AI683306 AA918481 AI183314 D83907 AI206832 AA876122 D83836 D83838 D82533 |
| | | AI761290 AI191125 AI143749 AW771909 AI241436 AI767267 W56507 AA847787 |
| | | AA568692 T10502 AI247870 AA715017 AA643304 AA890233 AA811387 AA897470 |
| | | AA907729 AI708679 AI078010 AA452830 AW419160 AI783713 N80205 W56778 AA676899 |
| | | AI888718 N69930 AI338935 AI217580 AA639508 AA575836 BE046852 AI312651 AI038406 |
| | | AA628649 AA643838 AI493761 AA032024 W38849 AA340178 AA447052 AA452969 W19369 |
| | | AA296364 H44229 W58767 C05751 C05835 AI741989 N98532 AW102617 AA412583 |
| | | AI922246 W38495 AA355375 AA928571 C06275 AA352500 N93132 |
| 454412 | 1174764_1 | AW582568 AW818656 AW818647 AW818655 AW818637 AW818234 |
| 454555 | 1223870_1 | AW807095 AW807022 AW845880 AW807096 AW807461 AW846116 AW807070 |
| 454717 | 1230516_1 | AW815123 AW815138 AW815259 |
| 455234 | 1265385_1 | R41084 AW875856 |
| 455424 | 1289247_1 | AW937733 AW937727 AW937883 |
| 455474 | 1292960_1 | AW948094 AW948118 AW948070 AW948093 AW948084 AW948088 AW948074 AW948079 AW948117 |
| | | AW948085 AW948081 AW948096 AW948102 AW948087 AW948080 AW948061 AW948091 AW948098 |
| | | AW948089 AW948104 AW948119 AW948069 AW948100 AW948112 AW948121 AW948068 AW948109 |
| | | AW948105 AW948097 AW948120 AW948108 AW948111 AW948114 AW948115 AW948072 AW948083 |
| | | AW948095 AW948116 AW948078 AW948077 AW948071 AW948067 AW948107 AW948122 AW948065 |
| | | AW948064 AW948113 AW948063 AW948062 |
| 455476 | 1293055_1 | AW948172 AW948178 AW948169 AW948176 AW948191 AW948192 AW948186 AW948184 AW948187 |
| | | AW948188 AW948189 AW948181 AW948177 AW948171 AW948183 AW948173 |
| 455591 | 1335166_1 | BE008018 BE008025 BE008026 BE007959 BE007994 BE008016 BE008019 BE008024 BE008022 |
| | | BE008027 BE008029 BE008020 BE008015 BE008021 BE008028 BE008023 BE008030 BE008014 |
| 455604 | 1337197_1 | BE011183 BE011170 BE011333 BE011188 BE011181 BE011324 BE011161 BE011169 |
| 455842 | 1374629_1 | BE145837 BE145894 |
| 457747 | 397222_1 | AW975000 AA658945 AA661558 |
| 458991 | 850804_1 | AI743502 AI807438 |
| 459192 | 923891_1 | AW176180 AW176212 AI909464 AW176218 AW176171 AW176203 AW176181 AW176213 |

Pkey: Unique Eos probeset identifier number
CAT number: Gene cluster number
Accession: Genbank accession numbers

[0387] TABLE 9C

| Pkey | Ref | Strand | Nt_position |
|---|---|---|---|
| 400634 | 8567750 | Minus | 101102-101223, 101886-102018 |
| 400750 | 8119067 | Plus | 198991-199168, 199316-199548 |
| 400752 | 7331445 | Minus | 36215-36461 |
| 400772 | 8131629 | Minus | 34896-35021, 41078-41197 |
| 400773 | 8131629 | Minus | 44116-44238, 48208-48321 |
| 400788 | 7342055 | Plus | 184369-184715 |
| 400789 | 8307741 | Plus | 82281-83693 |
| 400835 | 8954121 | Plus | 89366-89622 |
| 400843 | 9188605 | Plus | 5863-5970, 7653-7784, 8892-9023, 9673-9807, 10634-10789, 15254-15403, 23827-23958 |
| 400844 | 9188605 | Plus | 24746-24872, 25035-25204 |
| 400845 | 9188605 | Plus | 34428-34612 |
| 400846 | 9188605 | Plus | 39310-39474 |
| 400847 | 9188605 | Plus | 44643-44835 |
| 400957 | 7705148 | Minus | 66959-67241 |
| 400967 | 7770682 | Minus | 32697-32999 |
| 401038 | 7232177 | Minus | 4277-4469 |
| 401041 | 7232177 | Plus | 44750-45076 |
| 401058 | 8117654 | Minus | 45226-45414 |
| 401155 | 9438289 | Plus | 31381-31526 |
| 401177 | 9438503 | Minus | 62773-63330 |
| 401196 | 9719673 | Plus | 33138-33834 |
| 401204 | 9743388 | Minus | 33694-33872 |
| 401286 | 9801342 | Minus | 147036-147318 |
| 401346 | 9926605 | Minus | 12031-13032 |
| 401371 | 9650602 | Plus | 80901-81283 |
| 401383 | 6721135 | Minus | 155543-157381 |
| 401496 | 7381769 | Minus | 82790-83002 |
| 401512 | 7622346 | Plus | 136399-136557 |
| 401563 | 8247910 | Plus | 91395-91763 |
| 401572 | 8570271 | Minus | 78651-78889 |
| 401593 | 7230957 | Plus | 10368-10572, 11293-12356 |
| 401600 | 4388746 | Minus | 27363-27518, 28727-28891, 29526-29731 |
| 401603 | 7689963 | Minus | 116659-116780 |
| 401613 | 4878062 | Plus | 22461-22831 |
| 401654 | 9097132 | Minus | 64695-64797 |
| 401660 | 9100664 | Minus | 173662-174024 |
| 401720 | 6468551 | Plus | 7783-8468 |
| 401784 | 7249190 | Plus | 148362-148606, 149453-149535, 149731-149962 |
| 401835 | 7139700 | Plus | 142257-142742 |
| 401886 | 7229913 | Minus | 79215-79393 |
| 401936 | 3808091 | Plus | 46817-46943 |
| 402001 | 9501818 | Plus | 68052-68223 |
| 402087 | 8117546 | Plus | 137069-137213, 138678-138828, 138969-139050 |
| 402138 | 7704985 | Plus | 14173-15108 |
| 402144 | 7242326 | Plus | 115425-115977 |
| 402190 | 8576067 | Minus | 76488-76959 |
| 402191 | 8576073 | Minus | 69410-69583 |
| 402329 | 7798735 | Plus | 15833-16180, 18419-18715, 22507-22624 |
| 402368 | 9558577 | Minus | 47218-47330, 48052-48203 |
| 402371 | 9558584 | Plus | 68736-68956 |
| 402378 | 9625333 | Minus | 41312-41468, 48313-48720 |
| 402449 | 9796674 | Plus | 59867-60039, 62588-62828, 63465-63623, 64923-65108 |
| 402474 | 7547175 | Minus | 53526-53628, 55755-55920, 57530-57757 |
| 402517 | 9798106 | Plus | 17569-17721 |
| 402599 | 7239666 | Plus | 5835-5987 |
| 402617 | 9930797 | Minus | 69466-69945 |
| 402712 | 8969253 | Minus | 10941-11138 |
| 402731 | 9211639 | Minus | 117913-118004, 121110-121211, 121327-121457, 125478-125623, 126540-126663 |
| 402737 | 9212184 | Minus | 13358-13552 |
| 402754 | 9213730 | Plus | 15345-15852 |
| 402760 | 9213869 | Plus | 136829-136952, 137336-137521 |
| 402812 | 6010110 | Plus | 25026-25091, 25844-25920 |
| 402845 | 9369286 | Plus | 160451-160617, 160788-161009 |
| 402869 | 6434643 | Minus | 138639-139335 |
| 402892 | 8086844 | Minus | 194384-194645 |
| 403010 | 3132346 | Plus | 78385-79052 |
| 403149 | 9799833 | Plus | 25034-25185 |
| 403326 | 8440025 | Minus | 110959-111122 |
| 403329 | 8516120 | Plus | 96450-96598 |
| 403342 | 7233487 | Minus | 42312-43750 |
| 403349 | 8569773 | Minus | 167815-168374 |
| 403381 | 9438267 | Minus | 26009-26178 |
| 403463 | 9929538 | Plus | 102596-102879 |
| 403655 | 8736093 | Plus | 65668-65859 |
| 403725 | 7534031 | Plus | 86737-86843 |
| 403728 | 7534291 | Minus | 34481-34671 |
| 403807 | 8439933 | Minus | 162963-165773 |
| 403826 | 9838209 | Plus | 121197-121358 |
| 403885 | 7710403 | Minus | 53259-53524 |
| 403943 | 7711864 | Plus | 100742-100904, 101322-101503 |
| 403988 | 8576087 | Plus | 16251-16462 |
| 404029 | 7671252 | Plus | 108716-111112 |
| 404058 | 3548785 | Plus | 99397-101808 |
| 404069 | 3168619 | Plus | 47310-47450 |
| 404178 | 7630978 | Minus | 178075-178383 |
| 404204 | 3169112 | Minus | 79868-80321 |
| 404231 | 8218035 | Minus | 61077-61322 |
| 404250 | 9187145 | Minus | 36099-36212, 37928-38075 |
| 404273 | 9885189 | Plus | 97789-98285, 99601-99855 |
| 404343 | 9838093 | Plus | 122664-122931 |
| 404349 | 7630858 | Minus | 61006-61187 |
| 404391 | 3135305 | Minus | 26030-26173, 27852-27997 |
| 404392 | 3135305 | Minus | 29738-29857 |
| 404397 | 9558608 | Minus | 104042-104232 |
| 404438 | 6984205 | Plus | 63413-63553 |
| 404439 | 7139680 | Plus | 55316-55585 |
| 404530 | 6479107 | Plus | 3157-3304 |
| 404596 | 9958262 | Minus | 104807-105043 |
| 404649 | 9796926 | Minus | 100027-100399 |
| 404666 | 7272179 | Minus | 18677-18993 |
| 404687 | 9797554 | Minus | 128456-128565 |
| 404744 | 9187237 | Plus | 71776-71852, 72885-73019, 73700-73822, 74692-74850 |
| 404751 | 7630939 | Plus | 113799-114252, 114393-114715 |
| 404769 | 8099713 | Minus | 175801-176823 |
| 404790 | 7230958 | Plus | 38611-38761 |
| 404906 | 7331453 | Minus | 100985-101126 |
| 404956 | 7387343 | Plus | 55883-56203 |
| 404977 | 3738341 | Minus | 43081-43229 |
| 405000 | 6957544 | Minus | 88854-89993 |
| 405022 | 7330304 | Plus | 217163-217439 |
| 405053 | 7651944 | Minus | 157134-157430 |
| 405058 | 7655685 | Plus | 150740-151556 |
| 405155 | 9966228 | Plus | 130469-130723 |
| 405163 | 9966267 | Minus | 161171-161299 |
| 405165 | 9966302 | Plus | 6461-6845 |
| 405166 | 9966302 | Plus | 40526-40891 |
| 405172 | 9966752 | Plus | 153027-153262 |
| 405180 | 7139743 | Plus | 65438-65740 |
| 405193 | 7230072 | Plus | 128187-128383 |
| 405194 | 7230072 | Plus | 190465-190645, 193346-193610 |
| 405245 | 7249293 | Minus | 57560-58312 |
| 405365 | 2275192 | Minus | 119867-120372, 120481-120824, 121029-121357 |
| 405376 | 1552533 | Plus | 28875-29099 |
| 405418 | 6997292 | Plus | 51839-51953 |
| 405436 | 7408068 | Minus | 55716-55979 |
| 405443 | 7408143 | Plus | 90716-90887, 101420-101577 |
| 405474 | 8439781 | Plus | 172005-172175 |
| 405502 | 9211311 | Minus | 50360-50584 |
| 405580 | 4512267 | Plus | 169232-169647 |
| 405595 | 7159256 | Plus | 47585-47688 |
| 405630 | 4508116 | Minus | 103218-103291, 105858-105993, 110051-110126 |
| 405646 | 4914350 | Plus | 741-969 |
| 405710 | 5531256 | Minus | 66203-66832 |
| 405806 | 7274891 | Minus | 224961-226780 |
| 405812 | 4775630 | Minus | 29424-29764 |
| 405855 | 7652031 | Minus | 60377-60795 |
| 405879 | 6758747 | Minus | 54789-55457 |
| 405891 | 6758795 | Plus | 41062-41861 |
| 405902 | 6758795 | Minus | 82322-83110 |
| 405932 | 7767812 | Minus | 123525-123713 |
| 406038 | 8389537 | Plus | 37764-37877 |
| 406140 | 9168231 | Minus | 49887-50219 |
| 406181 | 5923650 | Plus | 16586-16855 |
| 406231 | 7417725 | Plus | 17206-17641, 17772-17968 |
| 406248 | 7417725 | Plus | 49711-50227 |
| 406274 | 7543787 | Plus | 932-1123 |
| 406356 | 7107907 | Plus | 18761-18973 |
| 406404 | 9256305 | Minus | 152569-152874 |
| 406467 | 9795551 | Plus | 182212-182958 |
| 406557 | 7711569 | Minus | 5446-5574, 6170-6352 |
| 406575 | 7711679 | Plus | 142034-142473 |

Pkey: Unique number corresponding to an Eos probeset
Ref: Sequence source. The 7 digit numbers in this column are Genbank Identifier (GI) numbers. “Dunham I. et al.” refers to the publication entitled “The DNA sequence of human chromosome 22.” Dunham I. et al., Nature (1999) 402: 489-495.
Strand: Indicates DNA strand from which exons were predicted.
Nt_position: Indicates nucleotide positions of predicted exons.

[0388] TABLE 10A
Genes preferentially expressed in non-invasive bladder tumors

| Pkey | ExAccn | UnigeneID | Unigene Title | R1 |
|---|---|---|---|---|
| 421110 | AJ250717 | Hs.1355 | cathepsin E | 8.23 |
| 428651 | AF196478 | Hs.188401 | annexin A10 | 5.78 |
| 451668 | Z43948 | Hs.326444 | cartilage acidic protein 1 | 5.53 |
| 415511 | AI732617 | Hs.182362 | ESTs | 4.72 |
| 428336 | AA503115 | Hs.183752 | microseminoprotein, beta- | 4.66 |
| 418026 | BE379727 | Hs.83213 | fatty acid binding protein 4, adipocyte | 4.62 |
| 400752 | | | NM_003105*: Homo sapiens sortilin-related | 3.99 |
| 430315 | NM_004293 | Hs.239147 | guanine deaminase | 3.82 |
| 403010 | | | C21000152: gi\|6226483\|sp\|Q52118\|YMO3_ERWS | 3.56 |
| 404977 | | | Insulin-like growth factor 2 (somatomedi | 3.54 |
| 426657 | NM_015865 | Hs.171731 | solute carrier family 14 (area transport | 3.51 |
| 400409 | AF153341 | | Homo sapiens winged helix/forkhead trans | 3.38 |
| 400844 | | | NM_003105*: Homo sapiens sortilin-related | 3.27 |
| 406081 | | | Target Exon | 3.22 |
| 417275 | X63578 | Hs.295449 | parvalbumin | 3.03 |
| 402230 | | | Target Exon | 2.96 |
| 454219 | X75042 | Hs.44313 | v-rel avian reticuloendotheliosis viral | 2.89 |
| 403381 | | | ENSP00000231844*: Ecotropic virus integra | 2.87 |
| 426088 | AF038007 | Hs.166196 | ATPase, Class I, type 8B, member 1 | 2.86 |
| 452286 | AI358570 | Hs.123933 | ESTs, Weakly similar to ZN91_HUMAN ZINC | 2.69 |
| 434061 | AW024973 | Hs.283675 | NPD009 protein | 2.66 |
| 418406 | X73501 | Hs.84905 | cytokeratin 20 | 2.65 |
| 418818 | AA228899 | Hs.101307 | Homo sapiens HUT11 protein mRNA, partial | 2.59 |
| 421594 | R45689 | Hs.21889 | Homo sapiens cDNA FLJ12978 fis, clone NT | 2.57 |
| 403383 | | | Target Exon | 2.56 |
| 435563 | AF210317 | Hs.95497 | solute carrier family 2 (facilitated glu | 2.55 |
| 424800 | AL035588 | Hs.153203 | MyoD family inhibitor | 2.54 |
| 404606 | | | Target Exon | 2.53 |
| 418205 | L21715 | Hs.83760 | troponin I, skeletal, fast | 2.53 |
| 431912 | AI660552 | Hs.76549 | ESTs, Weakly similar to A56154 Abl subst | 2.52 |
| 413786 | AW613780 | Hs.13500 | ESTs | 2.51 |
| 421100 | AW351839 | Hs.124660 | Homo sapiens cDNA: FLJ21763 fis, clone C | 2.50 |
| 416640 | BE262478 | Hs.79404 | neuron-specific protein | 2.50 |
| 420729 | AW964897 | Hs.290825 | ESTs | 2.50 |
| 402844 | | | C1000118*: gi\|9951913\|ref\|NP_062832.1\| pr | 2.48 |
| 401093 | | | C12000586*: gi\|6330167\|db\|BAA86477.1\| (A | 2.46 |
| 417720 | AA205625 | Hs.208067 | ESTs | 2.45 |
| 400297 | AI127076 | Hs.306201 | hypothetical protein DKFZp564O1278 | 2.45 |
| 403818 | | | Target Exon | 2.44 |
| 440273 | AI805392 | Hs.325335 | Homo sapiens cDNA: FLJ23523 fis, clone L | 2.44 |
| 418060 | AA211589 | Hs.208047 | ESTs | 2.40 |
| 400843 | | | NM_003105*: Homo sapiens sortilin-related | 2.38 |
| 446006 | NM_004403 | Hs.13530 | deafness, autosomal dominant 5 | 2.35 |
| 401512 | | | NM_014080: Homo sapiens dual oxidase-like | 2.34 |
| 446847 | T51454 | Hs.82845 | Homo sapiens cDNA: FLJ21930 fis, clone H | 2.32 |
| 417094 | NM_006895 | Hs.81182 | histamine N-methyltransferase | 2.31 |
| 436293 | AI601188 | Hs.120910 | ESTs | 2.30 |
| 436246 | AW450963 | Hs.119991 | ESTs | 2.30 |
| 447578 | AA912347 | Hs.136585 | ESTs, Weakly similar to JC5314 CDC28/cdc | 2.29 |
| 417381 | AF164142 | Hs.82042 | solute carrier family 23 (nucleobase tra | 2.28 |
| 426028 | NM_001110 | Hs.172028 | a disintegrin and metalloproteinase doma | 2.27 |
| 431448 | AL137517 | Hs.306201 | hypothetical protein DKFZp564O1278 | 2.26 |
| 437181 | AI306615 | Hs.125343 | ESTs, Weakly similar to KIAA0758 protein | 2.23 |
| 415025 | AW207091 | Hs.72307 | ESTs | 2.18 |
| 412610 | X90908 | Hs.74126 | fatty acid binding protein 6, ileal (gas | 2.04 |
| 424099 | AF071202 | Hs.139336 | ATP-binding cassette, sub-family C (CFTR | 2.03 |
| 433078 | AW015188 | Hs.121575 | Homo sapiens cDNA FLJ12231 fis, clone MA | 2.01 |
| 416225 | AA577730 | Hs.188684 | ESTs, Weakly similar to PC4259 ferritin | 2.00 |
| 411880 | AW872477 | | gb: hm30f03.x1 NCI_CGAP_Thy4 Homo sapiens | 1.99 |
| 452316 | AA298484 | Hs.61265 | ESTs, Moderately similar to G786_HUMAN P | 1.89 |
| 413804 | T64682 | | gb: yc48b02.r1 Stratagene liver (937224) | 1.88 |
| 432306 | Y18207 | Hs.303090 | protein phosphatase 1, regulatory (inhib | 1.76 |
| 405364 | | | ENSP00000239138*: Guanine nucleotide-bind | 1.60 |
| 414320 | U13616 | Hs.75893 | ankyrin 3, node of Ranvier (ankyrin G) | 1.52 |
| 401929 | | | C17001690:gi\|6005701\|ref\|NP_009099.1\| AT | 1.00 |

Pkey: Unique Eos probeset identifier number
ExAccn: Exemplar Accession number, Genbank accession number
UnigeneID: Unigene number
Unigene Title: Unigene gene title
R1 80th percentile of Ta tumor Als divided by the 80th percentile of T2-T4 tumor Als

[0389] TABLE 10B

| Pkey | CAT Number | Accession |
|---|---|---|
| 411880 | 1263110_1 | AW872477 BE088101 T05990 |
| 413804 | 1390710_1 | T64682 BE168190 BE168256 |

Pkey: Unique Eos probeset identifier number
CAT number: Gene cluster number
Accession: Genbank accession numbers

[0390] TABLE 10C

| Pkey | Ref | Strand | Nt_position |
|---|---|---|---|
| 400752 | 7331445 | Minus | 36215-36461 |
| 400843 | 9188605 | Plus | 5863-5970, 7653-7784, 8892-9023, |
| | | | 9673-9807, 10634-10789, |
| | | | 15254-15403, 23827-23958 |
| 400844 | 9188605 | Plus | 24746-24872, 25035-25204 |
| 401093 | 8516137 | Minus | 22335-23166 |
| 401512 | 7622346 | Plus | 136399-136557 |
| 401929 | 3810670 | Minus | 3167-3286, 4216-4310 |
| 402230 | 9966312 | Minus | 29782-29932 |
| 402844 | 9369286 | Plus | 54958-55313 |
| 403010 | 3132346 | Plus | 78385-79052 |
| 403381 | 9438267 | Minus | 26009-26178 |
| 403383 | 9438267 | Minus | 119837-121197 |
| 403818 | 8962065 | Minus | 138360-138512, 144656-144796 |
| 404606 | 9212936 | Minus | 22310-23269 |
| 404977 | 3738341 | Minus | 43081-43229 |
| 405364 | 2281075 | Minus | 48325-48491, 49136-49252 |
| 406081 | 9123861 | Minus | 38115-38691 |

Pkey: Unique number corresponding to an Eos probeset
Ref: Sequence source. The 7 digit numbers in this column are Genbank Identifier (GI) numbers. “Dunham I. et al.” refers to the publication entitled “The DNA sequence of human chromosome 22.” Dunham I. et al., Nature (1999) 402: 489-495.
Strand: Indicates DNA strand from which exons were predicted.
Nt_position: Indicates nucleotide positions of predicted exons.

[0391] TABLE 11A
Genes preferentially expressed in muscle-invasive bladder tumors

| Pkey | ExAccn | UnigeneID | Unigene Title | R1 |
|---|---|---|---|---|
| 423961 | D13666 | Hs.136348 | periostin (OSF-2os) | 11.22 |
| 421948 | L42583 | Hs.334309 | keratin 6A | 10.87 |
| 401780 | | | NM_005557*: Homo sapiens keratin 16 (foca | 9.16 |
| 446619 | AU076643 | Hs.313 | secreted phosphoprotein 1 (osteopontin, | 8.40 |
| 444381 | BE387335 | Hs.283713 | ESTs, Weakly similar to S64054 hypotheti | 7.88 |
| 439926 | AW014875 | Hs.137007 | ESTs | 7.73 |
| 408243 | Y00787 | Hs.624 | interleukin 8 | 7.54 |
| 414183 | AW957446 | Hs.301711 | ESTs | 7.00 |
| 411573 | AB029000 | Hs.70823 | KIAA1077 protein | 6.52 |
| 414522 | AW518944 | Hs.76325 | step II splicing factor SLU7 | 6.42 |
| 413063 | AL035737 | Hs.75184 | chitinase 3-like 1 (cartilage glycoprote | 6.14 |
| 441633 | AW958544 | Hs.112242 | normal mucosa of esophagus specific 1 | 6.04 |
| 427337 | Z46223 | Hs.176663 | Fc fragment of lgG, low affinity IIIb, r | 5.66 |
| 420859 | AW468397 | Hs.100000 | S100 calcium-binding protein A8 (calgran | 5.62 |
| 422168 | AA586894 | Hs.112408 | S100 calcium-binding protein A7 (psorias | 5.51 |
| 418870 | AF147204 | Hs.89414 | chemokine (C-X-C motif), receptor 4 (fus | 5.48 |
| 401781 | | | Target Exon | 5.46 |
| 421116 | T19132 | Hs.101850 | retinol-binding protein 1, cellular | 5.41 |
| 448429 | D17408 | Hs.21223 | calponin 1, basic, smooth muscle | 5.41 |
| 414020 | NM_002984 | Hs.75703 | small inducible cytokine A4 (homologous | 5.32 |
| 447526 | AL048753 | Hs.303649 | small inducible cytokine A2 (monocyte ch | 5.32 |
| 424247 | X14008 | Hs.234734 | lysozyme (renal amyloidosis) | 5.27 |
| 456525 | AW468397 | Hs.100000 | S100 calcium-binding protein A8 (calgran | 5.22 |
| 418007 | M13509 | Hs.83169 | matrix metalloproteinase 1 (interstitial | 5.17 |
| 406663 | U24683 | Hs.293441 | immunoglobulin heavy constant mu | 5.08 |
| 425593 | AA278921 | Hs.1908 | proteoglycan 1, secretory granule | 4.93 |
| 433336 | AF017986 | Hs.31386 | secreted frizzled-related protein 2 | 4.89 |
| 425118 | AU076611 | Hs.154672 | methylene tetrahydrofolate dehydrogenase | 4.74 |
| 415994 | NM_002923 | Hs.78944 | regulator of G-protein signalling 2, 24 k | 4.64 |
| 412326 | R07566 | Hs.73817 | small inducible cytokine A3 (homologous | 4.39 |
| 422158 | L10343 | Hs.112341 | protease inhibitor 3, skin-derived (SKAL | 4.30 |
| 446921 | AB012113 | Hs.16530 | small inducible cytokine subfamily A (Cy | 4.29 |
| 433470 | AW960564 | | transmembrane 4 superfamily member 1 | 4.23 |
| 417880 | BE241595 | Hs.82848 | selectin L (lymphocyte adhesion molecule | 4.22 |
| 446500 | U78093 | Hs.15154 | sushi-repeat-containing protein, X chrom | 4.22 |
| 413324 | V00571 | Hs.75294 | corticotropin releasing hormone | 4.20 |
| 436729 | BE621807 | | transmembrane 4 superfamily member 1 | 4.18 |
| 450455 | AL117424 | Hs.25035 | chloride intracellular channel 4 | 4.15 |
| 413731 | BE243845 | Hs.75511 | connective tissue growth factor | 4.09 |
| 412429 | AV650262 | Hs.75765 | GRO2 oncogene | 4.00 |
| 418283 | S79895 | Hs.83942 | cathepsin K (pycnodysostosis) | 4.00 |
| 418299 | AA279530 | Hs.83968 | integrin, beta 2 (antigen CD18 (p95), ly | 4.00 |
| 420899 | NM_001629 | Hs.100194 | arachidonate 5-lipoxygenase-activating p | 3.97 |
| 400288 | X06256 | Hs.149609 | integrin, alpha 5 (fibronectin receptor, | 3.95 |
| 437446 | AA788946 | Hs.101302 | ESTs, Moderately similar to CA1C RAT COL | 3.94 |
| 413441 | AI929374 | Hs.75367 | Src-like-adapter | 3.91 |
| 404854 | | | Target Exon | 3.81 |
| 431319 | AA873350 | Hs.302232 | ESTs | 3.77 |
| 452432 | AW206008 | Hs.283378 | Homo sapiens cDNA: FLJ21778 fis, clone H | 3.76 |
| 429679 | NM_006290 | Hs.211600 | tumor necrosis factor, alpha-induced pro | 3.72 |
| 428330 | L22524 | Hs.2256 | matrix metalloproteinase 7 (matrilysin, | 3.58 |
| 408380 | AF123050 | Hs.44532 | diubiquitin | 3.58 |
| 431103 | M57399 | Hs.44 | pleiotrophin (heparin binding growth fac | 3.57 |
| 422545 | X02761 | Hs.287820 | fibronectin 1 | 3.52 |
| 418203 | X54942 | Hs.83758 | CDC28 protein kinase 2 | 3.49 |
| 409956 | AW103364 | Hs.727 | inhibin, beta A (activin A, activin AB a | 3.48 |
| 406687 | M31126 | | matrix metalloproteinase 11 (stromelysin | 3.41 |
| 414359 | M62194 | Hs.75929 | cadherin 11, type 2, OB-cadherin (osteob | 3.36 |
| 417259 | AW903838 | Hs.81800 | chondroitin sulfate proteoglycan 2 (vers | 3.32 |
| 417497 | AW402482 | Hs.82212 | CD53 antigen | 3.30 |
| 449335 | AW150717 | Hs.345728 | STAT induced STAT inhibitor 3 | 3.25 |
| 445033 | AV652402 | Hs.72901 | mucin 13, epithelial transmembrane | 3.23 |
| 427274 | NM_005211 | Hs.174142 | colony stimulating factor 1 receptor, fo | 3.23 |
| 427527 | AI809057 | Hs.293441 | immunoglobulin heavy constant mu | 3.22 |
| 409142 | AL136877 | Hs.50758 | SMC4 (structural maintenance of chromoso | 3.18 |
| 453331 | AI240665 | | ESTs | 3.15 |
| 428036 | AW068302 | | Homo sapiens mRNA for caldesmon, 3′ UTR | 3.10 |
| 417366 | BE185289 | Hs.1076 | small proline-rich protein 1B (cornifin) | 3.09 |
| 414622 | AI752666 | Hs.76669 | nicotinamide N-methyltransferase | 3.07 |
| 418478 | U38945 | Hs.1174 | cyclin-dependent kinase inhibitor 2A (me | 3.02 |
| 417771 | AA804698 | Hs.82547 | retinoic acid receptor responder (tazaro | 2.77 |
| 413936 | AF113676 | Hs.297681 | serine (or cysteine) proteinase inhibito | 2.75 |
| 406755 | N80129 | Hs.94360 | metallothionein 1L | 2.75 |
| 426653 | AA530892 | Hs.171695 | deal specificity phosphatase 1 | 2.67 |
| 443623 | AA345519 | Hs.9641 | complement component 1, q subcomponent, | 2.65 |
| 443907 | AU076484 | Hs.9963 | TYRO protein tyrosine kinase binding pro | 2.64 |
| 422048 | NM_012445 | Hs.288126 | spondin 2, extracellular matrix protein | 2.51 |
| 410204 | AJ243425 | Hs.326035 | early growth response 1 | 2.46 |
| 438973 | AW959503 | Hs.60440 | ESTs, Weakly similar to serin protease w | 2.46 |
| 420202 | AL036557 | Hs.95910 | putative lymphocyte G0/G1 switch gene | 2.44 |
| 422626 | AA344932 | Hs.118786 | metallothionein 2A | 2.44 |
| 442402 | NM_000954 | Hs.8272 | prostaglandin D2 synthase (21 kD, brain) | 2.43 |
| 413902 | AU076743 | Hs.75613 | CD36 antigen (collagen type I receptor, | 2.42 |
| 434868 | R50032 | Hs.159263 | collagen, type VI, alpha 2 | 2.42 |
| 407207 | T03651 | Hs.336780 | tubulin, beta polypeptide | 2.30 |
| 438855 | AW946276 | Hs.6441 | Homo sapiens mRNA; cDNA DKFZp586J021 (fr | 2.29 |
| 430413 | AW842182 | Hs.241392 | small inducible cytokine A5 (RANTES) | 2.20 |
| 424909 | S78187 | Hs.153752 | cell division cycle 25B | 2.18 |
| 419938 | AU076772 | Hs.1279 | complement component 1, r subcomponent | 2.17 |
| 416819 | U77735 | Hs.80205 | pim-2 oncogene | 2.11 |
| 422562 | AI962060 | Hs.118397 | AE-binding protein 1 | 2.07 |
| 414081 | AW969976 | Hs.279009 | matrix Gla protein | 2.07 |
| 426406 | AI742501 | Hs.169756 | complement component 1, s subcomponent | 2.03 |
| 443950 | NM_001425 | Hs.9999 | epithelial membrane protein 3 | 2.01 |
| 418323 | NM_002118 | Hs.1162 | major histocompatibility complex, class | 1.94 |
| 414420 | AA043424 | Hs.76095 | immediate early response 3 | 1.90 |
| 415149 | X12451 | Hs.78056 | cathepsin L | 1.72 |
| 415213 | NM_002933 | Hs.78224 | ribonuclease, RNase A family, 1 (pancrea | 1.70 |
| 421848 | X15880 | Hs.108885 | collagen, type VI, alpha 1 | 1.69 |
| 452516 | AA058630 | Hs.29759 | RNA POLYMERASE I AND TRANSCRIPT RELEASE | 1.64 |
| 427676 | AA394062 | Hs.300772 | tropomyosin 2 (beta) | 1.64 |
| 415198 | AW009480 | Hs.943 | natural killer cell transcript 4 | 1.60 |
| 424390 | AW815657 | Hs.182241 | interferon induced transmembrane protein | 1.59 |
| 426825 | AL133415 | Hs.297753 | vimentin | 1.51 |
| 452363 | AI582743 | Hs.94953 | Homo sapiens, Similar to complement comp | 1.46 |
| 407694 | U77594 | Hs.37682 | retinoic acid receptor responder (tazaro | 1.44 |

Pkey: Unique Eos probeset identifier number
ExAccn: Exemplar Accession number, Genbank accession number
UnigeneID: Unigene number
Unigene Title: Unigene gene title
R1 80th percentile of T2-T4 tumor Als divided by the 80th percentile of Ta tumor Als

[0392] TABLE 11B

| Pkey | CAT Number | Accession |
|---|---|---|
| 428036 | 28620_1 | AW068302 AI754558 AI750727 AI752631 AA302174 AA327522 M64110 AW859944 AW859989 AI751995 |
| | | AA769620 AI858829 AI924875 AI888836 AA864291 AI685060 AW088029 AI924908 AW466328 |
| | | AI093800 AA991651 AI254601 BE004703 AA334442 AW938852 AA194330 |
| | | AL046953 AA852866 AW391995 W30846 AW662928 W25261 AA042863 R99045 H97060 |
| | | W03910 H94687 T88984 AL048165 T29632 N31556 N36484 AI798679 AA989355 W23832 |
| | | AA873789 AI743646 AA363587 AI814748 AW338990 N73740 N83666 AL047816 R24137 |
| | | R63433 AA524984 AA234043 AA195131 N99903 AA453669 AI240302 AA370271 AI950026 |
| | | AW771049 AA121476 AA569557 AI752632 AI355594 AI471993 AI159941 N94555 AI753138 |
| | | N21537 H97881 N25769 AW068044 AA808425 R63380 AA384736 AA384738 AA852352 |
| | | AI073645 AA527960 AA525036 AA044414 AI752460 AA703064 R01216 AA897183 AI751996 |
| | | T81078 H95047 AA573642 D58348 N20953 AA437143 N95439 AA579540 AW867056 |
| | | AA770090 AI085180 AI806799 AA426421 AI572513 R24081 AA853189 AA295620 AA234044 |
| | | AA371020 AW994984 H20896 AW964438 AA318516 AA318499 AA318727 AA318211 |
| | | AA318478 AA318444 AA318307 AA318497 AA318448 AA318309 AA318496 AA318213 |
| | | AA318435 AA318424 AA318217 AA318523 AA318438 AA318487 AA318724 AA593185 |
| | | AW994985 T69842 AI251813 AA478174 AA447737 T68350 F07712 AA121145 H08973 |
| | | AA345212 BE000667 AW068210 AW608407 R05674 H16712 N85426 N42354 H85516 |
| | | BE147991 T28113 R32662 AA384678 AW239275 H82382 AW840700 D58229 C04082 |
| | | W45394 AW795667 R73973 BE002409 AA042828 AA363555 AJ223812 AA344709 |
| | | BE149590 R70995 W46881 W90778 N71242 AA534826 AL040676 R23797 H96450 |
| | | AA062957 D79947 W46960 AW959278 AA295997 AA026215 AW579469 AW365135 |
| | | AW365134 AW994353 AW972886 AW069166 AA343690 AW888731 AI751527 AA937490 |
| | | AA937506 AI826715 BE465604 AI925532 AI858109 AW339097 AI858524 AI720571 |
| | | BE04650 AW384981 AA043908 AA375983 AA525181 AW068366 AW070577 AW891837 |
| | | N83985 AW182753 AI422979 AI679733 BE006555 AL048166 AI081401 AI888821 AI626043 |
| | | N37087 AI624140 AI801298 AA600048 AI753947 H89615 N66424 AW069756 AI814880 |
| | | AI982806 AI754287 AI971816 AW069022 AW069069 AW069454 AA342989 AI077712 |
| | | AI311467 AI087361 AI801015 W46993 AI281324 AW191963 AI421675 AI300881 AI356670 |
| | | AA873156 AI004219 AI189685 AA478018 AA076063 AI445222 AI753124 AI521569 |
| | | AI925026 AI022368 AI475993 H20846 AI223234 AI635123 AA579170 N30442 AW117889 |
| | | AA807935 AA558975 AI306636 AA888963 AI952591 AI935835 AI445293 H16713 |
| | | AW139833 AA622122 AA972051 AI280828 H09543 AI453725 AW069613 AI865615 |
| | | AI753921 AI368782 AI633208 AI446651 W46961 N22201 H82276 C16555 AA291477 |
| | | AW440535 AW517755 AA669921 AI926777 AW662118 AA553369 N67873 AW023948 |
| | | C15861 C16601 AI251465 AW079187 BE045090 AI273006 C16390 C16503 AI620823 |
| | | F13661 N66864 Z21311 C16108 C16089 C16400 AA758273 AI287781 AA864676 |
| | | AW608074 AW385583 AI589944 AA665817 AW192979 AW469065 M564048 H84715 |
| | | C16417 AA731072 AA661674 C16487 N29477 AW189997 AI370492 C16471 AA652809 |
| | | AA936687 AA506512 C16306 AW028413 AI537935 AA528347 C16255 AW029046 C16202 |
| | | AI868152 AI524662 T94414 AI567041 AI619654 AW008486 AI075624 AA577434 AA345104 |
| | | T30105 AA932002 C16585 AI750390 AW294265 AI619552 AA669781 AA026678 AW132002 |
| | | AW263919 C16562 AA759137 AA693351 Z40779 C16577 AA885045 AW073763 R45484 |
| | | AI520895 U54708 T49285 AI568126 AW006569 AI093317 AL119781 T61046 AI053563 |
| | | H51958 AF114144 AA305739 AW950394 AW793928 AW793910 AL047737 AV659047 |
| | | AV659632 AI750389 AA092053 AA092798 H85367 T61597 R23745 Z20418 T78485 |
| | | AI751528 AW068121 AA853188 AI752459 AA853711 AW950663 R78964 R36359 |
| | | R21626 R21522 |
| 433470 | 3672_1 | AW960564 AA092457 T55890 D56120 T92525 AI815987 |
| | | BE182608 BE182595 AW080238 M90657 AA347236 AW961686 AW176446 |
| | | AA304671 AW583735 T61714 AA316968 AI446615 AA343532 AA083489 AA488005 |
| | | W52095 W39480 N57402 D82638 W25540 W52847 D82729 D58990 BE619182 |
| | | AA315188 AA308636 AA112474 W76162 AA088544 H52265 AA301631 H80982 |
| | | AA113786 BE620997 AW651691 AA343799 BE613669 BE547180 BE546656 F11933 |
| | | AA376800 AW239185 AA376086 BE544387 BE619041 AA452515 AA001806 AA190873 |
| | | AA180483 AA159546 F00242 AI940609 AI940602 AI189753 T97663 T66110 AW062896 |
| | | AW062910 AW062902 AI051622 AI828930 AA102452 AI685095 AI819390 AA557597 |
| | | AA383220 AI804422 AI633575 AW338147 AW603423 AW606800 AW750567 |
| | | AW510672 AI250777 AA083510 AW629109 AW513200 AA921353 AI677934 |
| | | AI148698 AI955858 AA173825 AA453027 AI027865 AW375542 AA454099 AA733014 |
| | | AI591384 R79300 R80023 AA843108 AA626058 AA844898 AW375550 AA889018 |
| | | AI474275 AW205937 AI052270 AW388117 AW388111 AA699452 AI242230 N47476 |
| | | H38178 AA366621 AA113196 AA130023 H39740 T61629 AI885973 AW083671 |
| | | AA179730 AA305757 AI285455 N83956 AA216013 AA336155 AW999959 T97525 |
| | | AA345349 T91762 AA771981 AI285092 AI591386 BE392486 BE385852 AA682601 |
| | | AI682884 AA345840 T85477 AA292949 AA932079 AA098791 D82607 T48574 |
| | | AW752038 C06300 |
| 436729 | 42585_1 | BE621807 AI445461 AI346835 AI453743 AI564644 |
| | | AI928364 AW984527 BE156214 AI694111 AI591358 C17504 C17476 C17963 C18304 |
| | | AW071625 AI678712 C17732 D57559 H61762 AI720939 AI262930 H27252 AA479712 |
| | | AI927769 AA291465 AA155661 AI963432 AI567995 AA421678 AI925607 AA292956 |
| | | AA192448 AW192593 AI865838 AI696905 AI871950 AI911921 BE619741 BE439796 |
| | | AI161312 AI597801 AI424384 AI093510 AI240988 AW820230 AI492554 BE044033 |
| | | AW262737 AW008570 AA043216 AW629505 AA136645 AA037722 AA706057 |
| | | AA088439 AW806193 AW806183 AA479834 BE501957 AA129574 R38114 AA649494 |
| | | AA524526 BE327120 AW572531 BE219784 BE349186 AW015724 AA043217 |
| | | AW772000 AI799814 AI671727 AW779725 AA502832 AI470033 AA129575 W38161 |
| | | AI972739 AA404570 AA627686 AA723200 AA147228 AA903050 AI990245 AI075878 |
| | | T32487 C06123 AA157944 AI800106 W60075 AI859160 AA478328 AW673152 AA182640 |
| | | AI990827 AW275048 AW103470 AI298935 AW471421 R79190 AW085158 W45410 |
| | | AI333170 AW300456 AA662517 T55840 AI823466 AI692846 AA962397 AW191997 |
| | | AA136658 AI251817 BE044134 AW339104 AW517762 AA724739 R79933 AA411100 |
| | | AA191349 AA037696 AA190966 AA757735 AW772283 AA010631 H80983 AI769516 |
| | | H64985 AI061065 AI950693 AA085492 AI245632 H28594 AW088968 BE156360 AI349390 |
| | | AI621320 AI738844 AW194272 AA148284 AA953883 C06365 AA487893 AI927217 |
| | | AI918523 AI453453 AI798502 AI189366 AI261359 AI032569 AW338678 AI972899 AI500576 |
| | | AI872628 AI693030 Z28771 AI985583 AI363829 AW339301 AA581093 AI650338 W60032 |
| | | AA603586 AI686240 AW242958 AA719173 AI745717 AW675302 AI582462 AI244845 |
| | | AI565439 F09579 AI918453 AA035576 AI472527 AW351556 AA191414 AW674145 |
| | | D57558 AI446740 D57845 AI589264 C05782 AA722206 AI432033 R21752 |
| | | BE157510 AI829640 AI468237 AW384233 AA989662 AI865912 AW197954 AI344941 |
| | | X75684 AI344943 AW583310 AA988297 AI334860 AI348877 AI798415 D11921 AI377596 |
| | | AI983655 AI744233 C06111 AI248307 AA948565 AI224807 |
| 453331 | 96214_1 | AI240665 T53681 N77468 H51833 AA147247 R75732 C18450 |
| | | R73999 AI095755 T49904 H03868 AA411580 R33395 AA410586 T48869 |
| | | D63292 R31981 H12498 H02668 AA035018 R75957 AI803329 R27528 R36203 AI809932 |
| | | AI808765 R78948 AA411449 AA976929 AI378760 AI378620 T48870 R73906 R75632 |
| | | H03612 AA909684 N50695 H02580 H12839 N58781 AA742532 AI360919 H03502 |
| | | BE208298 R68588 AI350463 R31935 AW069127 AA411621 R25671 R36105 H12451 |
| | | H03869 H51263 AA035486 R25109 R25110 AA147933 |

Pkey: Unique Eos probeset identifier number
CAT number: Gene cluster number
Accession: Genbank accession numbers

[0393] TABLE 11C

| Pkey | Ref | Strand | Nt_position |
|---|---|---|---|
| 401780 | 7249190 | Minus | 28397-28617, 28920-29045, |
| | | | 29135-29296, 29411-29567, |
| | | | 29705-29787 30224-30573 |
| 401781 | 7249190 | Minus | 83215-83435, 83531-83656, |
| | | | 83740-83901, 84237-84393, |
| | | | 84955-85037, |
| | | | 86290-86814 |
| 404854 | 7143420 | Plus | 14260-14537 |

Pkey: Unique number corresponding to an Eos probeset
Ref: Sequence source. The 7 digit numbers in this column are Genbank Identifier (GI) numbers. “Dunham I. et al.” refers to the publication entitled “The DNA sequence of human chromosome 22.* Dunham I. et al., Nature (1999) 402: 489-495.
Strand: Indicates DNA strand from which exons were predicted.
Nt_position: Indicates nucleotide positions of predicted exons.

[0394] TABLE 12A
Genes preferentially expressed in muscle-invasive bladder tumors

| Pkey | ExAccn | UnigeneID | Unigene Title | Seq ID No. |
|---|---|---|---|---|
| 424503 | NM_002205 | Hs.149609 | integrin, alpha 5 (fibronectin receptor, | Seq ID No. 1 & 2 |
| 400289 | X07820 | Hs.2258 | matrix metalloproteinase 10 (stromelysin | Seq ID No. 3 & 4 |
| 418007 | M13509 | Hs.83169 | matrix metalloproteinase 1 (interstitial | Seq ID No. 5 & 6 |
| 418738 | AW388633 | Hs.6682 | solute carrier family 7, (cationic amino | Seq ID No. 7 & 8 |
| 406964 | M21305 | | FGENES predicted novel secreted protein | Seq ID No. 9 & 10 |
| 429276 | AF056085 | Hs.198612 | G protein-coupled receptor 51 | Seq ID No. 11 & 12 |
| 428227 | AA321649 | Hs.2248 | small inducible cytokine subfamily B (Cy | Seq ID No. 13 & 14 |
| 410102 | AW248508 | Hs.279727 | ESTs; homologue of PEM-3 [Ciona savignyi | Seq ID No. 15 & 16 |
| 425247 | NM_005940 | Hs.155324 | matrix metalloproteinase 11 (stromelysin | Seq ID No. 17 & 18 |
| 424735 | U31875 | Hs.272499 | short-chain alcohol dehydrogenase family | Seq ID No. 19 & 20 |
| 420159 | AI572490 | Hs.99785 | Homo sapiens cDNA: FLJ21245 fis, clone C | Seq ID No. 21 & 22 |
| 415511 | AI732617 | Hs.182362 | ESTs | Seq ID No. 23-25 |
| 452461 | N78223 | Hs.108106 | transcription factor | Seq ID No. 26 & 27 |
| 413324 | V00571 | Hs.75294 | corticotropin releasing hormone | Seq ID No. 28 & 29 |
| 443211 | AI128388 | Hs.143655 | ESTs | Seq ID No. 30 |
| 439926 | AW014875 | Hs.137007 | ESTs | Seq ID No. 31 & 32 |
| 432222 | AI204995 | | gb: an03c03.x1 Stratagene schizo brain S1 | Seq ID No. 33 |
| 408908 | BE296227 | Hs.250822 | serine/threonine kinase 15 | Seq ID No. 34 & 35 |
| 443171 | BE281128 | Hs.9030 | TONDU | Seq ID No. 36 & 37 |
| 432829 | W60377 | Hs.57772 | ESTs | Seq ID No. 38 & 39 |
| 410553 | AW016824 | Hs.272068 | hypothetical protein MGC14128 | Seq ID No. 40 & 41 |
| 419183 | U60669 | Hs.89663 | cytochrome P450, subfamily XXIV (vitamin | Seq ID No. 42 & 43 |
| 425721 | AC002115 | Hs.159309 | uroplakin 1A | Seq ID No. 44 & 45 |
| 420370 | Y13645 | Hs.97234 | uroplakin 2 | Seq ID No. 46 & 47 |
| 437852 | BE001836 | Hs.256897 | ESTs, Weakly similar to dJ365O12.1 [H. sa | Seq ID No. 48 & 49 |
| 428664 | AK001666 | Hs.189095 | similar to SALL1 (sal (Drosophila)-like | Seq ID No. 50 & 51 |
| 456034 | AW450979 | | gb: UI-H-BI3-ala-a-12-0-UI.s1 NCL_CGAP_Su | Seq ID No. 52 |
| 421110 | AJ250717 | Hs.1355 | cathepsin E | Seq ID No. 53 & 54 |
| 451668 | Z43948 | Hs.326444 | cartilage acidic protein 1 | Seq ID No. 55-60 |
| 408243 | Y00787 | Hs.624 | interleukin 8 | Seq ID No. 61 & 62 |
| 440304 | BE159984 | Hs.125395 | ESTs | Seq ID No. 63 & 64 |
| 414918 | AI219207 | Hs.72222 | hypothetical protein FLJ13459 | Seq ID No. 65 & 66 |
| 418867 | D31771 | Hs.89404 | msh (Drosophila) homeo box homolog 2 | Seq ID No. 67 & 68 |
| 426088 | AF038007 | Hs.166196 | ATPase, Class I, type 8B, member 1 | Seq ID No. 69 & 70 |
| 405033 | | | C1002652*: gi\|544327\|sp\|Q04799\|FMO5_RABIT | Seq ID No. 71 & 72 |
| 422282 | AF019225 | Hs.114309 | apolipoprotein L | Seq ID No. 73 & 74 |
| 425852 | AK001504 | Hs.159651 | death receptor 6, TNF superfamily member | Seq ID No. 75 & 76 |
| 400844 | | | NM_003105*: Homo sapiens sortilin-related | Seq ID No. 77 & 78 |
| 404875 | | | NM_022819*: Homo sapiens phospholipase A2 | Seq ID No. 79 & 80 |
| 422809 | AK001379 | Hs.121028 | hypothetical protein FLJ10549 | Seq ID No. 81 & 82 |
| 431347 | AI133461 | Hs.251664 | insulin-like growth factor 2 (somatomedi | Seq ID No. 83 & 84 |
| 413804 | T64682 | | gb: yc48b02.r1 Stratagene liver (937224) | Seq ID No. 85 & 86 |
| 444163 | AI126098 | | FGENESH predicted RNaseH domain-containi | Seq ID No. 87-89 |
| 444444 | AI149332 | Hs.14855 | ESTs | Seq ID No. 90 & 91 |
| 427747 | AW411425 | Hs.180655 | serine/threonine kinase 12 | Seq ID No. 92 & 93 |
| 419741 | NM_007019 | Hs.93002 | ubiquitin carrier protein E2-C | Seq ID No. 94 & 95 |
| 420281 | AI623693 | Hs.323494 | Predicted cation efflux pump | Seq ID No. 96 & 97 |
| 402305 | | | C19000735*: gi\|4508027\|ref\|NP_003414.1\|z | Seq ID No. 98-100 |
| 436608 | AA628980 | | down syndrome critical region protein DS | Seq ID No. 101 & 102 |
| 427239 | BE270447 | | ubiquitin carrier protein | Seq ID No. 103 & 104 |
| 413278 | BE563085 | Hs.833 | interferon-stimulated protein, 15 kDa | Seq ID No. 105 & 106 |
| 424008 | R02740 | Hs.137555 | putative chemokine receptor; GTP-binding | Seq ID No. 107 & 108 |
| 414907 | X90725 | Hs.77597 | polo (Drosophia)-like kinase | Seq ID No. 109 & 110 |
| 421379 | Y15221 | Hs.103982 | small inducible cytokine subfamily B(Cy | Seq ID No. 111 & 112 |
| 426028 | NM_001110 | Hs.172028 | a disintegrin and metalloproteinase doma | Seq ID No. 113 & 114 |
| 417079 | U65590 | Hs.81134 | interleukin 1 receptor antagonist | Seq ID No. 115 & 116 |
| 401093 | | | C12000586*: gi\|6330167\|dbj\|BAA86477.1\|(A | Seq ID No. 117-119 |
| 422247 | U18244 | Hs.113602 | solute carrier family 1 (high affinity a | Seq ID No. 120 & 121 |
| 449722 | BE280074 | Hs.23960 | cyclin B1 | Seq ID No. 122 & 123 |
| 423673 | BE003054 | Hs.1695 | matrix metalloproteinase 12 (macrophage | Seq ID No. 124 & 125 |
| 418478 | U38945 | Hs.1174 | cyclin-dependent kinase inhibitor 2A (me | Seq ID No. 126-133 |
| 439606 | W79123 | Hs.58561 | G protein-coupled receptor 87 | Seq ID No. 134 & 135 |
| 418543 | NM_005329 | Hs.85962 | hyaluronan synthase 3 | Seq ID No. 136 & 137 |
| 418678 | NM_001327 | Hs.167379 | cancer/testis antigen (NY-ESO-1) | Seq ID No. 138-141 |
| 428182 | BE386042 | Hs.293317 | ESTs, Weakly similar to GGC1_HUMAN G ANT | Seq ID No. 142 & 143 |
| 427335 | AA448542 | Hs.251677 | G antigen 7B | Seq ID No. 144 & 145 |
| 409420 | Z15008 | Hs.54451 | laminin, gamma 2 (nicein (100 kD), kalini | Seq ID No. 146 & 147 |
| 404440 | | | NM_021048: Homo sapiens melanoma antigen, | Seq ID No. 148 & 149 |
| 433091 | Y12642 | Hs.3185 | lymphocyte antigen 6 complex, locus D | Seq ID No. 150 & 151 |
| 408380 | AF123050 | Hs.44532 | diubiquitin | Seq ID No. 152 & 153 |
| 409893 | AW247090 | Hs.57101 | minichromosome maintenance deficient (S. | Seq ID No. 154 & 155 |
| 424905 | NM_002497 | Hs.153704 | NIMA (never in mitosis gene a)-related k | Seq ID No. 156 & 157 |
| 438817 | AI023799 | | ESTs | Seq ID No. 158 |
| 421478 | AI683243 | Hs.97258 | ESTs, Moderately similar to S29539 ribos | Seq ID No. 159 & 160 |
| 431515 | NM_012152 | Hs.258583 | EDG-7 (endothelial differentiation, lys | Seq ID No. 161 & 162 |
| 433159 | AB035898 | Hs.150587 | kinesin-like protein 2 | Seq ID No. 163 & 164 |
| 432441 | AW292425 | Hs.163484 | ESTs | Seq ID No. 165 |
| 425726 | AF085808 | Hs.159330 | uroplakin 3 | Seq ID No. 166 & 167 |
| 448045 | AJ297436 | Hs.20166 | prostate stem cell antigen | Seq ID No. 168 & 169 |
| 431846 | BE019924 | Hs.271580 | uroplakin 1B | Seq ID No. 170 & 171 |
| 437044 | AL035864 | Hs.69517 | differentially expressed in Fanconi's an | Seq ID No. 172 & 173 |
| 444381 | BE387335 | Hs.283713 | ESTs, Weakly similar to S64054 hypotheti | Seq ID No. 174 & 175 |
| 400303 | AA242758 | Hs.79136 | LIV-1 protein, estrogen regulated | Seq ID No. 176 & 177 |
| 452747 | BE153855 | Hs.61460 | Ig superfamily receptor LNIR | Seq ID No. 178 & 179 |
| 400297 | AI127076 | Hs.306201 | hypothetical protein DKFZp564O1278 | Seq ID No. 180 & 181 |
| 428484 | AF104032 | Hs.184601 | solute carrier family 7 (cationic amino | Seq ID No. 182 & 183 |
| 429211 | AF052693 | Hs.198249 | gap junction protein, beta 5 (connexin 3 | Seq ID No. 184 & 185 |
| 417389 | BE260964 | Hs.82045 | midkine (neurite growth-promoting factor | Seq ID No. 186 & 187 |
| 445537 | AJ245671 | Hs.12844 | EGF-like-domain, multiple 6 | Seq ID No. 188 & 189 |
| 423961 | D13666 | Hs.136348 | periostin (OSF-2os) | Seq ID No. 190 & 191 |
| 417433 | BE270266 | Hs.82128 | 5T4 oncofetal trophoblast glycoprotein | Seq ID No. 192 & 193 |
| 444781 | NM_014400 | Hs.11950 | GPI-anchored metastasis-associated protein homolog | Seq ID No. 194 & 195 |
| 430486 | BE062109 | Hs.241551 | chloride channel, calcium activated, family member 2 | Seq ID No. 196 & 197 |
| 425650 | NM_001944 | Hs.1925 | desmoglein 3 (pemphigus vulgaris antigen) | Seq ID No. 198 & 199 |
| 409103 | AF251237 | Hs.112208 | XAGE-1 protein | Seq ID No. 200 & 201 |
| 129404 | AI267700 | | ESTs | Seq ID No. 202 |
| 403047 | | | NM_005656*: Homo sapiens transmembrane protease | Seq ID No. 203 & 204 |
| 439738 | BE246502 | Hs.9598 | sema domain, immunoglobulin domain (Ig), transmem | Seq ID No. 205 & 206 |

Pkey: Unique Eos probeset identifier number
ExAccn: Exemplar Accession number, Genbank accession number
UnigeneID: Unigene number
Unigene Title: Unigene gene title
Seq ID No.: Sequence Identification Number linking information in Table 12A to sequences in Table 13

[0395] TABLE 12B

| Pkey | CAT Number | Accession |
|---|---|---|
| 413804 | 1390710_1 | T64682 BE168190 BE168256 |
| 427239 | 27647_1 | BE270447 AW409921 BE207288 BE207170 D56355 BE263223 BE408171 BE262243 BE392439 BE292738 BE261776 |
| | | BE314300 BE267719 BE268715 BE513876 BE295291 BE297066 AA210923 BE407519 H51344 BE622905 AW248281 |
| | | AW250313 T19021 AA355115 AA316879 BE269633 BE621936 AA290724 AA380031 AA993616 BE301331 |
| | | W79220 H73020 AW797850 BE274611 BE314315 BE542407 BE562063 BE312868 BE278817 BE252503 AA426470 |
| | | M91670 NM_014501 BE264533 AI884863 AI884942 AI678077 AA829937 AI869333 AW273060 AA906924 |
| | | AI571293 AW172642 AA582906 AW674596 AW300936 AW615753 AW615587 AW665495 AI859296 AA594105 |
| | | AA928110 AI038859 AI589898 AA828316 AA938955 AA283711 AW170665 BE047759 AW732128 AI015067 AW070748 |
| | | AW248955 AA975490 AA211097 AI826097 AA826730 AA994072 AI367867 W74508 AI086474 AA827720 AI922589 |
| | | AW000868 W58033 AA991461 BE048131 M91218 AA876186 AA661759 AI123879 AI089508 AW272915 AI566244 |
| | | AW245061 AA688299 AW250988 AI953468 AI891144 AW089131 AI471577 AA293354 AA464019 BE044549 |
| | | T29587 AW956171 BE537716 BE269400 AA918328 AI536087 AA969243 AW075033 BE139361 AI340589 |
| | | AI250128 AI247038 BE138953 AW075177 AI307208 BE049086 AW302327 AI054335 AI345565 AI334881 AI252075 |
| | | AI254494 AW075006 AW302733 AW302738 AI054057 AI054217 AI054172 AI054302 AI053722 AI054060 AI054079 |
| | | AW075181 AI307473 AI312145 AI340734 AI334909 AW071374 BE138502 AW074809 AW301901 AI251662 AI307559 |
| | | BE139228 AI254764 AW073049 AI251264 AI802837 AW271867 AI307442 AW075100 AW073456 AW072496 |
| | | AI270787 AW271039 AW071307 AI610913 AW071289 AI251232 AI251262 AW073656 AW072901 AI307493 |
| | | AI255068 AI251289 AI252160 AI271496 AI252427 AW073469 AW071420 AI270156 AI252926 AI252839 |
| | | AI252868 AW072520 AW073433 AI340643 AI802854 AI334733 AI583896 AW071311 AI802853 AI289711 |
| | | AI345036 AW072513 AI348921 AI307478 AI305762 BE139315 AW271034 AI334886 AI340619 AW470478 |
| | | BE139260 BE138965 AW302085 BE041872 AW268964 |
| 432222 | 343347_1 | AI204995 AW827539 AW969908 AW440776 AA528756 |
| 436608 | 42361_3 | AA628980 AI126603 BE504035 |
| 438817 | 465592_1 | AI023799 AA826307 AI683094 AI307373 AI870547 AW979007 |
| 444163 | 593658_1 | AI126098 AI184746 AI148521 |
| 456034 | 142696_1 | AW450979 AA136653 AA136656 AW419381 AA984358 AA492073 BE168945 |
| | | AA809054 AW238038 BE011212 BE011359 BE011367 |
| | | BE011368 BE011362 BE011215 BE011365 BE011363 |

Pkey: Unique Eos probeset identifier number
CAT number: Gene cluster number
Accession: Genbank accession numbers

[0396] TABLE 12C

| Pkey | Ref | Strand | Nt_position |
|---|---|---|---|
| 400844 | 9188605 | Plus | 24746-24872, 25035-25204 |
| 401093 | 8516137 | Minus | 22335-23166 |
| 402305 | 7328724 | Plus | 40832-41362 |
| 404440 | 7528051 | Plus | 80430-81581 |
| 404875 | 9801324 | Plus | 96588-96732, 97722-97831 |
| 405033 | 7107731 | Minus | 142358-142546 |

Pkey: Unique number corresponding to an Eos probeset
Ref: Sequence source. The 7 digit numbers in this column are Genbank Identifier (GI) numbers. “Dunham I. et al.” refers to the publication entitled “The DNA sequence of human chromosome 22.” Dunham I. et al., Nature (1999) 402: 489-495.
Strand: Indicates DNA strand from which exons were predicted.
Nt_position: Indicates nucleotide positions of predicted exons.

[0397] TABLE 13

| | |
|---|---|
| Seq ID NO: 1 DNA sequence: | |
| Nucleic Acid Accession #: NM_002205 | |
| Coding sequence: 24 . . . 3173 | |
| 1 11 21 31 41 51 | |
| \| \| \| \| \| \| | |
| CACGACAGGG AACAGCGGGC GCTATGGGGA GCCGGACGCC AGAGTCCCCT CTCCACGCCG | 60 |
| TGCAGCTGCC CTGCCCCCCC CCGCGCCCAC CCCCGCTCGT GCCGCTGCTG TTGCTGCTCG | 120 |
| TGCC0CCGCC ACCCAGCGTC GGGGGCTTCA ACTTAGACGC GGAGGCCCCA GCAGTACTCT | 180 |
| CGGGGCCCCC CCCCTCCTTC TTCGGATTCT CAGTGGAGTT TTACCGGCCG GGAACAGACG | 240 |
| CCCTCAGTGT GCTGGTGCCA CCACCCAAGG CTAATACCAG CCAGCCAGGA GTGCTGCAGG | 300 |
| GTGCTUCTGT CTACCTCTGT CCTTGGGGTG CCAGCCCCAC ACAGTGCACC CCCATTGAAT | 360 |
| TTGACAGCAA AGGCTCTCGG CTCCTGGAGT CCTCACTGTC CACCTCAGAG GGAGAGGAGC | 420 |
| CTGTGGAGTA CAAGTCCTTG CAGTGGTTCG GGGCAACAGT TCGAGCCCAT GGCTCCTCCA | 480 |
| TCTTGGCATG CGCTCCACTG TACAGCTGGC GCACACAGAA CGAGCCACTG AGCGACCCCG | 540 |
| TGGGCACCTC CTACCTCTCC ACAGATAACT TCACCCGAAT TCTGGAGTAT GCACCCTGCC | 600 |
| GCTCAGATTT CAGCTGGGCA GCAGGACAGG GTTACTGCCA AGGAGGCTTC ACTGCCGACT | 660 |
| TCACCAAGAC TGGCCGTGTG GTTTTAGGTG GACCAGGAAG CTATTTCTGG CAAGGCCAGA | 720 |
| TCCTGTCTGC CACTCAGGAG CAGATTGCAG AATCTTATTA CCCCGAGTAC CTGATCAACC | 780 |
| TGGTTCAGGG GCAGCTGCAG ACTCGCCAGG CCAGTTCCAT CTATGATGAC AGCTACCTAG | 840 |
| GATACTCTGT GUCTGTTGGT GAATTCAGTG GTGATGACAC AGAAGACTTT GTTGCTGGTG | 900 |
| TGCCCAAAGG GAACCTCACT TACCGCTATG TCACCATCCT TAATGGCTCA GACATICCAT | 960 |
| CCCTCTACAA CTTCTCAGGG GAACAGATGG CCTCCTACTT TGGCTATGCA GTGGCCGCCA | 1020 |
| CAGACGTCAA TGGGGACGGG CTGGATGACT TGCTGGTGGG GGCACCCCTG CTCATGGATC | 1080 |
| GGACCCCTGA CGGGCGGCCT CAGGAGGTGG GCAGGGTCTA CGTCTACCTG CACCACCCAG | 1140 |
| CCGGCATAGA GCCCACGCCC ACCCTTACCC TCACTGGCCA TGATGAGTTT GGCCGATTTG | 1200 |
| GCAGCTCCTT GACCCCCCTG GGGGACCTGG ACCAGGATGG CTACAATGAT GTGGCCATCG | 1260 |
| GGGCTCCCTT TGGTGGGGAG ACCCAGCAGG GAGTAGTGTT TGTATTTCCT GGGGGCCCAG | 1320 |
| GAGGGCTGGG CTCTAAGCCT TCCCAGGTTC TGCAGCCCCT GTGGGCAGCC AGCCACACCC | 1380 |
| CAGACTTCTT TGGCTCTGCC CTTCGAGGAG GCCGAGACCT GGATGGCAAT GGATATCCTG | 1440 |
| ATCTGATTGT GGGGTCCTTT GGTGTGGACA AGGCTGTGGT ATACAGGGGC CGCCCCATCG | 1500 |
| TGTCCGCTAG TGCCTCCCTC ACCATCTTCC CCGCCATGTT CAACCCAGAG GAGCGGAGCT | 1560 |
| GCAGCTTAGA GGGGAACCCT GTGGCCTGCA TCAACCTTAG CTTCTGCCTC AATGCTTCTG | 1620 |
| GAAAACACGT TGCTGACTCC ATTGGTTTCA CAGTGGAACT TCAGCTGGAC TGGCAGAAGC | 1680 |
| AGAAGGGAGG GGTACGGCGG GCACTGTTCC TGGCCTCCAG GCAGGCAACC CTGACCCAGA | 1740 |
| CCCTGCTCAT CCAGAATGGG GCTCGAGAGG ATTGCAGAGA GATGAAGATC TACCTCAGGA | 1800 |
| ACGAGTCAGA ATTTCGAGAC AAACTCTCGC CGATTCACAT CGCTCTCAAC TTCTCCTTGG | 1860 |
| ACCCCCAAGC CCCAGTGGAC AGCCACGGCC TCAGGCCAGC CCTACATTAT CAGAGCAAGA | 1920 |
| GCCGGATAGA GGACAAGGCT CAGATCTTGC TGGACTGTGG AGAAGACAAC ATCTGTGTGC | 1980 |
| CTGACCTGCA GCTGGAAGTG TTTGGGGAGC AGAACCATGT GTACCTGGGT GACAAGAATG | 2040 |
| CCCTGAACCT CACTTTCCAT GCCCAGAATG TGGGTGAGGG TGGCGCCTAT GAGGCTGAGC | 2100 |
| TTCGGGTCAC CGCCCCTCCA GAGGCTGAGT ACTCAGGACT CGTCAGACAC CCAGGGAACT | 2160 |
| TCTCCAGCCT GAGCTGTGAC TACTTTGCCG TGAACCAGAG CCGCCTGCTG GTGTGTGACC | 2220 |
| TGGGCAACCC CATGAAGGCA GGAGCCAGTC TGTGGGGTGG CCTTCGGTTT ACAGTCCCTC | 2280 |
| ATCTCCGGGA CACTAAGAAA ACCATCCAGT TTGACTTCCA GATCCTCAGC AAGAATCTCA | 2340 |
| ACAACTCGCA AAGCGACGTG GTTTCCTTTC GGCTCTCCGT GGAGGCTCAG GCCCAGGTCA | 2400 |
| CCCTGAACGG TGTCTCCAAG CCTGAGGCAG TGCTATTCCC AGTAAGCGAC TGGCATCCCC | 2460 |
| GAGACCAGCC TCAGAAGGAG GAGGACCTGG GACCTGCTGT CCACCATGTC TATGAGCTCA | 2520 |
| TCAACCAAGG CCCCAGCTCC ATTAGCCAGG GTGTGCTGGA ACTCAGCTGT CCCCAGGCTC | 2580 |
| TGGAAGGTCA GCAGCTCCTA TATGTGACCA GAGTTACGGG ACTCAACTGC ACCACCAATC | 2640 |
| ACCCCATTAA CCCAAAGGGC CTGGAGTTGG ATCCCGAGGG TTCCCTGCAC CACCAGCAAA | 2700 |
| AACGGGAAGC TCCAAGCCGC AGCTCTGCTT CCTCGGGACC TCAGATCCTG AAATGCCCGG | 2760 |
| AGGCTGAGTG TTTCAGGCTG CGCTGTGAGC TCGGGCCCCT GCACCAACAA GAGAGCCAAA | 2820 |
| GTCTGCAGTT GCATTTCCGA GTCTGGGCCA AGACTTTCTT GCACCGGGAG CACCAGCCAT | 2880 |
| TTAGCCTGCA GTGTGAGGCT GTGTACAAAG CCCTGAAGAT GCCCTACCGA ATCCTGCCTC | 2840 |
| GGCAGCTGCC CCAAAAAGAG CGTCAGGTGG CCACAGCTGT GCAATGGACC AAGGCAGAAG | 3000 |
| GCAGCTATGG CGTCCCACTG TGGATCATCA TCCTAGCCAT CCTGTTTGGC CTCCTGCTCC | 3060 |
| TAGGTCTACT CATCTACATC CTCTACAAGC TTGGATTCTT CAAACGCTCC CTCCCATATG | 3120 |
| GCACCGCCAT GGAAAAAGCT CAGCTCAAGC CTCCAGCCAC CTCTGATGCC TGAGTCCTCC | 3180 |
| CAATTTCAGA CTCCCATTCC TGAAGAACCA GTCCCCCCAC CCTCATTCTA CTGAAAAGGA | 3240 |
| GGGGTCTGGG TACTTCTTGA AGGTGCTGAC GGCCAGGGAG AAGCTCCTCT CCCCAGCCCA | 3300 |
| GAGACATACT TGAAGGGCCA GAGCCAGGGG GGTGAGGAGC TGGGGATCCC TCCCCCCCAT | 3360 |
| GCACTGTGAA GGACCCTTGT TTACACATAC CCTCTTCATG GATGGGGGAA CTCAGATCCA | 3420 |
| GGGACAGAGG CCCAGCCTCC CTGAAGCCTT TGCATTTTGG AGAGTTTCCT GAAACAACTG | 3480 |
| GAAAGATAAC TAGGAAATCC ATTCACAGTT CTTTGGGCCA GACATGCCAC AAGGACTTCC | 3540 |
| TGTCCAGCTC CAACCTGCAA AGATCTGTCC TCAGCCTTGC CAGAGATCCA AAAGAAGCCC | 3600 |
| CCAGTAAGAA CCTGGAACTT GGGGAGTTAA GACCTGGCAG CTCTGGACAG CCCCACCCTG | 3660 |
| GTGGGCCAAC AAAGAACACT AACTATGCAT GGTGCCCCAG GACCAGCTCA GGACAGATGC | 3720 |
| CACAAGGATA GATGCTGGCC CAGGGCCAGA GCCCAGCTCC AAGGGGAATC AGAACTCAAA | 3780 |
| TGGGGCCAGA TCCAGCCTGG GGTCTGGAGT TGATCTGGAA CCCAGACTCA GACATTGGCA | 3840 |
| CCAATCCAGG CAGATCCAGG ACTATATTTG GGCCTGCTCC AGACCTGATC CTGGAGGCCC | 3900 |
| AGTTCACCCT GATTTAGGAG AAGCCAGGAA TTTCCCAGGA CCTGAAGGGG CCATGATGGC | 3960 |
| AACAGATCTG GAACCTCAGC CTGGCCAGAC ACAGGCCCTC CCTGTTCCCC AGAGAAAGGG | 4020 |
| GAGCCCACTG TCCTGGGCCT GCAGAATTTG GGTTCTGCCT GCCAGCTGCA CTGATGCTGC | 4080 |
| CCCTCATCTC TCTGCCCAAC CCTTCCCTCA CCTTGGCACC AGACACCCAG GACTTATTTA | 4140 |
| AACTCTGTTG CAAGTGCAAT AAATCTGACC CAGTGCCCCC ACTGACCAGA ACTAGAAAAA | 4200 |
| AAAA | |
| Seq ID NO: 2 Protein sequence: | |
| Protein Acceecion #: NP_002196.1 | |
| 1 11 21 31 41 51 | |
| \| \| \| \| \| \| | |
| MGSRTPESPL NAVQLRWGPR RRPPLVPLLL LLVPPPPRVG GFNLDAEAPA VLSGPPGSFP | 60 |
| GFSVEFYRPG TDGVSVLVGA PKANTSQPGV LQGGAVYLCP WGASPTQCTP IEPDSKGSRL | 120 |
| LESSLSSSEG EEPVEYKSLQ WFGATVRARG SSILACAPLY SWRTEKEPLS DPVGTCYLST | 180 |
| DNPTRILEYA PCRSDFSWAA GQGYCQGGPS AEPTKTGRVV LGGPGSYFNQ GQILSATQEQ | 240 |
| IAESYYPEYL INLVQGQLQT RQASSIYDDS YLGYSVAVGE PSGDDTEDPV AGVPKGNLTY | 300 |
| GYVTILNGSD INSLYNPGGE QMASYFGYAV AATDVNGDGL DDLLVGAPLL MDRTPDGRPQ | 360 |
| EVGRVYVYLQ HPAGIEPTPT LTLTGHDEFG RFGSSLTPLG DLDQDGYNDV AIGAPEGGET | 420 |
| QQGVVFVPPG GPGGLGSEPS QVLQPLWAAS NTPDFFGSAL RGGRGLDGNG YPDLIVGSFG | 480 |
| VDKAVVYRGR PIVSASASLT IFPANPNPEE RSCSLEGNPV ACINLSFCLN ASGENVADSI | 540 |
| GPTVELQLDW QKQKGGVRRA LFLASRQATL TQTLLIQNGA REGCREMEIY LRNESEFRDK | 600 |
| LSPINIALNF SLDPQAPVDS NGLRPALHYQ SKSRIEDKAQ ILLGCCEDNI CVPDLQLEVF | 660 |
| GEQNHVYLGD KNALNLTFNA QNVGEGGAYE AELRVTAPPE AEYSGLVRNP GNFSSLSCDY | 720 |
| EAVNQSRLLV CDLGNPMKAG ASLWGGLRFT VPNLRDTKKT IQFDFQILSK NLNNSQSDVV | 780 |
| SFRLSVEAQA QVTLNGVSKP EAVLFPVSDW NPRDQPQKEE DLGPAVNNVY ELINQGPSSI | 840 |
| SQGVLELSCP QALEGQQLLY VTRVTGLNCT TNHPINPKGL ELDPEGSLNH QQKREAPSRS | 900 |
| SASSGPQILK CPEAECFRLR CELGPLNQQE SQSLQLNPRV WAKTFLQREN QPFSLQCEAV | 960 |
| YKALKNPYRI LPRQLPQKER QVATAVQWTK AEGSYGVPLW IIILAILFGL LLLGLLIYIL | 1020 |
| YKLGPPKRSL PYGTANEKAQ LKPPATSDA | |
| Seq ID NO: 3 DNA sequence: | |
| Nucleic Acid Accession #: NM_002425 | |
| Coding sequence: 23 . . . 1453 | |
| 1 11 21 31 41 51 | |
| \| \| \| \| \| \| | |
| AAAGAAGGTA AGGGCAGTGA GAATGATGCA TCTTGCATTC CTTGTGCTGT TGTGTCTGCC | 60 |
| AGTCTGCTCT GCCTATCCTC TGAGTGGGGC AGCAAAAGAG GAGGACTCCA ACAAGGATCT | 120 |
| TGCCCAGCAA TACCTAGAAA AGTACTACAA CCTCGAAAAG GATGTGAAAC AGTTTAGAAG | 180 |
| AAAGGACAGT AATCTCATTG TTAAAAAAAT CCAAGGAATG CAGAAGTTCC TTGGGTTGGA | 240 |
| GGTGACAGGG AAGCTAGACA CTGACACTCT GGAGGTGATG CGCAAGCCCA GGTGTGGAGT | 300 |
| TCCTGACGTT GGTCACTTCA GCTCCTTTCC TGGCATGCCG AAGTGGAGGA AAACCCACCT | 360 |
| TACATACAGG ATTGTGAATT ATACACCAGA TTTGCCAAGA GATGCTGTTG ATTCTGCCAT | 420 |
| TGAGAAAGCT CTGAAAGTCT GGGAAGAGGT GACTCCACTC ACATTCTCCA GGCTGTATGA | 480 |
| AGGAGAGGCT GATATAATGA TCTCTTTCGC AGTTAAAGAA CATGGAGACT TTTACTCTTT | 540 |
| TGATGGCCCA GGACACAGTT TGGCTCATGC CTACCCACCT GGACCTGGGC TTTATGGAGA | 600 |
| TATTCACTTT GATGATGATG AAAAATGGAC AGAAGATGCA TCAGGCACCA ATTTATTCCT | 660 |
| CGTTGCTGCT CATGAACTTG GCCACTCCCT GGGGCTCTTT CACTCAGCCA ACACTGAAGC | 720 |
| TTTGATGTAC CCACTCTACA ACTCATTCAC AGAGCTCGCC CAGTTCCGCC TTTCGCAAGA | 780 |
| TGATGTGAAT GGCATTCAGT CTCTCTACGG ACCTCCCCCT GCCTCTACTG AGCAACCCCT | 840 |
| GGTGCCCACA AAATCTGTTC CTTCGGGATC TGAGATGCCA GCCAAGTGTG ATCCTGCTTT | 900 |
| GTCCTTCGAT GCCATCAGCA CTCTGAGGGG AGAATATCTG TTCTTTAAAG ACAGATATTT | 960 |
| TTGGCGAAGA TCCCACTGGA ACCCTGAACC TGAATTTCAT TTGATTTCTG CATTTTGGCC | 1020 |
| CTCTCTTCCA TCATATTTGG ATGCTGCATA TGAAGTTAAC ACCAGGGACA CCGTTTTTAT | 1080 |
| TTTTAAAGGA AATGAGTTCT GGGCCATCAG AGGAAATGAG GTACAAGCAG GTTATCCAAG | 1140 |
| AGGCATCCAT ACCCTGGGTT TTCCTCCAAC CATAAGGAAA ATTGATGCAG CTGTTTCTGA | 1200 |
| CAAGGAAAAG AAGAAAACAT ACTTCTTTGC AGCGGACAAA TACTGGAGAT TTGATGAAAA | 1260 |
| TAGCCAGTCC ATGGAGCAAG GCTTCCCTAG ACTAATAGCT GATGACTTTC CAGGAGTTGA | 1320 |
| GCCTAAGGTT GATGCTGTAT TACAGGCATT TGGATTTTTC TACTTCTTCA GTGGATCATC | 1380 |
| ACAGTTTGAG TTTGACCCCA ATGCCAGGAT GGTGACACAC ATATTAAAGA GTAACAGCTG | 1440 |
| GTTACATTGC TAGGCGAGAT AGGGGGAAGA CAGATATGGG TGTTTTTAAT AAATCTAATA | 1500 |
| ATTATTCATC TAATGTATTA TGAGCCAAAA TGGTTAATTT TTCCTGCATG TTCTGTGACT | 1560 |
| GAAGAAGATG AGCCTTGCAG ATATCTGCAT GTGTCATGAA GAATGTTTCT GGAATTCTTC | 1620 |
| ACTTGCTTTT GAATTGCACT GAACAGAATT AAGAAATACT CATGTGCAAT AGGTGAGAGA | 1680 |
| ATGTATTTTC ATAGATGTGT TATTACTTCC TCAATAAAAA GTTTTATTTT GGGCCTGTTC | 1740 |
| CTT | |
| Seq ID NO: 4 Protein sequence: | |
| Protein Accession #: NP_002416 | |
| 1 11 21 31 41 51 | |
| \| \| \| \| \| \| | |
| MMNLAFLVLL CLPVCSAYPL SGAAKEEDSN KDLAQQYLEK YYNLEKDVKQ FRRKDSNLIV | 60 |
| KKIQGMQKFL GLEVTGKLDT DTLEVNRKPR CGVPDVGNFS SFPGMPKWRK TELTYRIVNY | 120 |
| TPDLPRDAVD SAIEKALKVW EEVTPLTFSR LYEGEADIMI SFAVKENGDF YSFDGPGNSL | 180 |
| ANAYPPGPGL YGDINFDDDE KWTEDASGTN LFLVAANELG NSLGLFNSAN TEALMYPLYN | 240 |
| SFTELAQFRL SQDDVNGIQS LYGPPPASTE EPLVPTKSVP SGSEMPAKCD PALSFDAIST | 300 |
| LRGEYLFFKD RYFNRRSNWN PEPEFNLISA FWPSLPSYLD AAYEVNSRDT VFIFKGNEFW | 360 |
| AIRGNEVQAG YPRGINTLGF PPTIRKIDAA VSGKEKKKTY FFAADKYWRF DENSQSMEQG | 420 |
| FGNLIADDEP GVEPKVDAVL GAFGFFYFFS GSSQPEFDPN ANMVTHILKS NSWLNC | |
| Seq ID NO: 5 DNA sequence: | |
| Nucleic Acid Accession #: NN_002421 | |
| Coding sequence: 72 . . . 1481 | |
| 1 11 21 31 41 51 | |
| \| \| \| \| \| \| | |
| GGGATATTGC AGTAGCAAGA GGCTGGGAAG CCATCACTTA CCTTGCACTG AGAAAGAAGA | 60 |
| CAAACCCCAC TATCCACAGC TTTCCTCCAC TGCTGCTGCT GCTGTTCTGG GGTGTGGTGT | 120 |
| CTCACAGCTT CCCAGCGACT CTAGAAACAC AAGAGCAAGA TGTGGACTTA GTCCAGAAAT | 180 |
| ACCTGGAAAA ATACTACAAC CTGAAGAATG ATGGGAGGCA AGTTGAAAAG CGGAGAAATA | 240 |
| GTGGCCCAGT GGTTGAAAAA TTGAAGCAAA TGCAGCAATT CTTTGGGCTG AAAGTGACTC | 300 |
| GGAAACCAGA TGCTGAAACC CTGAACGTGA TGAAGCACCC CAGATGTGGA GTGCCTGATG | 360 |
| TCGCTCAGTT TCTCCTCACT GACGGGAACC CTCGCTGGGA GCAAACACAT CTGACCTACA | 420 |
| GGATTGAAAA TTACACGCCA GATTTGCCAA GAGCAGATGT GGACCATGCC ATTGAGAAAG | 480 |
| CCTTCCAACT CTGGAGTAAT GTCACACCTC TGACATTCAC CAAGGTCTCT GAGGGTCAAG | 540 |
| CAGACATCAT GATATCTTTT GTCAGGGGAG ATCATCGGGA CAACTCTCCT TTTGATGGAC | 600 |
| CTGGAGGAAA TCTTGCTCAT GCTTTTCAAC CAGGCCCAGG TATTGGAGGG GATGCTCATT | 660 |
| TTGATGAAGA TGAAAGGTGG ACCAACAATT TCAGAGAGTA CAACTTACAT CGTGTTGCGG | 720 |
| CTCATGAACT CGGCCATTCT CTTGGACTCT CCCATTCTAC TGATATCGGG GCTTTGATGT | 780 |
| ACCCTAGCTA CACCTTCAGT GGTGATGTTC AGCTAGCTCA GGATGACATI GATGGCATCC | 840 |
| AAGCCATATA TGGACGTTCC CAAAATCCTG TCCAGCCCAT CGGCCCACAA ACCCCAAAAG | 900 |
| CGTGTGACAG TAAGCTAACC TTTGATGCTA TAACTACGAT TCGGGGAGAA GTGATGTTCT | 960 |
| TTAAAGACAG ATTCTACATG CGCACAAATC CCTTCTACCC GGAAGTTGAG CTCAATTTCA | 1020 |
| TTTCTGTTTT CTGGCCACAA CTGCCAAATG GGCTTGAAGC TGCTTACGAA TTTGCCGACA | 1080 |
| GAGATGAAGT CCGGTTTTTC AAAGGGAATA ACTACTGGGC TGTTCAGGGA CAGAATGTGC | 1140 |
| TACACGGATA CCCCAAGGAC ATCTACAGCT CCTTTGGCTT CCCTAGAACT GTGAAGCATA | 1200 |
| TCGATGCTGC TCTTTCTGAG GAAAACACTG GAAAAACCTA CTTCTTTGTT GCTAACAAAT | 1260 |
| ACTGGAGGTA TGATGAATAT AAACGATCTA TGGATCCAGG TTATCCCAAA ATGATAGCAC | 1320 |
| ATGACTTTCC TGGAATTGGC CACAAAGTTG ATGCAGTTTT CATGAAAGAT GGATTTTTCT | 1380 |
| ATTTCTTTCA TGGAACAAGA CAATACAAAT TTGATCCTAA AACGAAGAGA ATTTTGACTC | 1440 |
| TCCAGAAAGC TAATAGCTGG TTCAACTGCA GGAAAAATTG AACATTACTA ATTTGAATGG | 1500 |
| AAAACACATG GTGTGAGTCC AAAGAAGGTG TTTTCCTGAA GAACTGTCTA TTTTCTCAGT | 1560 |
| CATTTTTAAC CTCTAGAGTC ACTGATACAC AGAATATAAT CTTATTTATA CCTCAGTTTG | 1620 |
| CATATTTTTT TACTATTTAG AATGTAGCCC TTTTTGTACT GATATAATTT AGTTCCACAA | 1680 |
| ATGGTGGGTA CAAAAAGTCA AGTTTGTGGC TTATGGATTC ATATAGGCCA GAGTTGCAAA | 1740 |
| GATCTTTTCC AGACTATGCA ACTCTGACGT TGATGCCAGA GAGCAGCTTC AGTGACAAAC | 1800 |
| ATATCCTTTC AAGACAGAAA GAGACAGGAG ACATGAGTCT TTGCCGGAGG AAAAGCAGCT | 1860 |
| CAAGAACACA TGTGCAGTCA CTGGTGTCAC CCTGGATAGG CAAGGGATAA CTCTTCTAAC | 1920 |
| ACAAAATAAG TGTTTTATGT TTGGAATAAA GTCAACCTTG TTTCTACTGT TTT | |
| Seq ID NO: 6 Protein sequence: | |
| Protein Accession 4: NP_002412 | |
| 1 11 21 31 41 51 | |
| \| \| \| \| \| \| | |
| MHSPPPLLLL LFWGVVSHSF PATLETQEQD VGLVQKYLEK YYNLKNGGRG VEKNRNSGPV | 60 |
| VEKLKQMQEP FGLKVTGKPD AETLKVMKQP RCGVPGVAQF VLTEGNPRWE QTNLTYNTEN | 120 |
| YTPGLPNAGV GNAIEKAFQL WSNVTPLTFT KVSEGQAGIM ISFVRGGHND NSPPGGPGGN | 180 |
| LANAFQPGPG IDGGAHEDED ENWTNNPNNY NLHRVAANNL GNSLGLSNST GIDALMYPSY | 240 |
| TFSGGVQLAQ GGIDGIQAIY GNSQNPVQPI DPQTPKACGS KLTFGAITTI NDEVNFFKGN | 300 |
| FYMRTNPFYP EVELNFISVF WPQLPNGLNA AYEFAGRGSV RFFKGNKYWA VQGQNVLHGY | 360 |
| PKDIYSSFGP PNTVKNIDAA LSEENTGKTY FFVANKYWRY GEYKESMGPG YPKMIANGFP | 420 |
| GIDNKVGAVF MEGGEFYPEN GTRQYKFGPK TKRILTLQKA NSWFNCNKN | |
| Seq ID NO: 7 DNA sequence: | |
| Nucleic Acid Accession 4: NM_014331 | |
| Coding sequence: 1 . . . 1506 | |
| 1 11 21 31 41 51 | |
| \| \| \| \| \| \| | |
| ATGGTCAGAA AGCCTGTTGT GTCCACCATC TCCAAAGGAG GTTACCTGCA GGGAAATGTT | 60 |
| AACGGGAGGC TGCCTTCCCT GGGCAACAAG GAGCCACCTG GGCAGGAGAA AGTGCAGCTG | 120 |
| AAGAGGAAAG TCACTTTACT GAGGGGAGTC TCCATTATCA TTGGCACCAT CATTGGAGCA | 180 |
| GGAATCTTCA TCTCTCCTAA GGGCGTGCTC CAGAACACGG GCAGCGTGGG CATGTCTCTG | 240 |
| ACCATCTGGA CGGTGTGTGG GGTCCTGTCA CTATTTGGAG CTTTGTCTTA TGCTGAATTG | 300 |
| GGAACAACTA TAAAGAAATC TGGAGGTCAT TACACATATA TTTTGGAAGT CTTTGGTCCA | 360 |
| TTACCAGCTT TTGTACGAGT CTGGGTGGAA CTCCTCATAA TACGCCCTGC AGCTACTGCT | 420 |
| GTGATATCCC TGGCATTTGG ACGCTACATT CTGGAACCAT TTTTTATTCA ATGTGAAATC | 480 |
| CCTGAACTTG CGATCAAGCT CATTACAGCT GTGGGCATAA CTGTAGTGAT GGTCCTAAAT | 540 |
| AGCATGAGTG TCAGCTGGAG CGCCCGGATC CAGATTTTCT TAACCTTTTG CAAGCTCACA | 600 |
| GCAATTCTGA TAATTATAGT CCCTGGAGTT ATGCAGCTAA TTAAAGGTCA AACGCAGAAC | 660 |
| TTTAAAGACG CGTTTTCAGG AAGAGATTCA AGTATTACGC GGTTGCCACT GGCTTTTTAT | 720 |
| TATGGAATGT ATGCATATGC TGGCTGGTTT TACCTCAACT TTGTTACTGA AGAAGTAGAA | 780 |
| AACCCTGAAA AAACCATTCC CCTTGCAATA TGTATATCCA TGGCCATTGT CACCATTGGC | 840 |
| TATGTGCTGA CAAATGTGGC CTACTTTACG ACCATTAATG CTGAGGAGCT GCTGCTTTCA | 900 |
| AATGCAGTGG CAGTGACCTT TTCTGAGCGG CTAGTGGCAA ATTTCTCATT ACCAGTTCCG | 960 |
| ATCTTTGTTG CCCTCTCCTG CTTTGGCTCC ATCAACGGTG GTGTGTTTGC TGTCTCCAGG | 1020 |
| TTATTCTATG TTGCGTCTCG AGAGGGTCAC CTTCCAGAAA TCCTCTCCAT GATTCATGTC | 1080 |
| CGCAAGCACA CTCCTCTACC AGCTGTTATT GTTTTGCACC CTTTGACAAT GATAATGCTC | 1140 |
| TTCTCTGGAG ACCTCGACAG TCTTTTGAAT TTCCTCAGTT TTGCCAGGTG GCTTTTTATT | 1200 |
| GGGCTGGCAG TTGCTGGGCT GATTTATCTT CGATACAAAT GCCCAGATAT GCATCGTCCT | 1260 |
| TTCAAGGTGC CACTGTTCAT CCCAGCTTTG TTTTCCTTCA CATGCCTCTT CATGGTTGCC | 1320 |
| CTTTCCCTCT ATTCGGACCC ATTTAGTACA GGGATTGGCT TCGTCATCAC TGTGACTGGA | 1380 |
| GTCCCTGCGT ATTATCTCTT TATTATATGG GACAAGAAAC CCAGGTGGTT TAGAATAATG | 1440 |
| TCAGAGAAAA TAACCAGAAC ATTACAAATA ATACTGGAAG TTGTACCAGA AGAAGATAAG | 1500 |
| TTATGAACTA ATGGACTTGA GATGTTGGGA ATCTGCCCAA GGGGAGACAC AAAATAGGGA | 1560 |
| TTTTTACTTC ATTTTCTGAA AGTCTAGAGA ATTACAACTT TGGTGATAAA CAAAAGGAGT | 1620 |
| CAGTTATTTT TATTGATATA TTTTAGCATA TTCGAACTAA TTTCTAAGAA ATTTAGTTAT | 1680 |
| AACTCTATGT AGTTATAGAA AGTGAATATG CAGTTATTCT ATGAGTCGCA CAATTCTTGA | 1740 |
| GTCTCTGATA CCTACCTATT GGGGTTAGGA GAAAAGACTA GACAATTACT ATGTGGTCAT | 1800 |
| TCTCTACAAC ATATGTTAGC ACGGCAAAGA ACCTTCAAAT TGAAGACTGA GATTTTTCTG | 1860 |
| TATATATGGG TTTTGTAAAG ATGGTTTTAC ACACTACAGA TGTGTATACT GTGAAAAGTG | 1920 |
| TTTTCAATTC TGAAAAAAAG CATACATCAT GATTATGGGA AAGAGGAGAG AAAGAAATTT | 1980 |
| ATTTTACATT GACATTGCAT TGCTTCCCCT TAGATACCAA TTTAGATAAC AAACACTCAT | 2040 |
| GCTTTAATGG ATTATACCCA GAGCACTTTG AACAAAGGTC AGTGGGGATT GTTGAATACA | 2100 |
| TTAAAGAAGA GTTTCTAGGG GCTACTGTTT ATGAGACACA TCCAGGAGTT ATGTTTAAGT | 2160 |
| AAAAATCCTT GAGAATTTAT TATGTCAGAT GTTTTTTCAT TCATTATCAG GAAGTTTTAG | 2220 |
| TTATCTGTCA TTTTTTTTTT TCACATCAGT TTGATCAGGA AAGTGTATAA CACATCTTAG | 2280 |
| AGCAAGAGTT AGTTTGGTAT TAAATCCTCA TTAGAACAAC CACCTGTTTC ACTAATAACT | 2340 |
| TACCCCTGAT GAGTCTATCT AAACATATGC ATTTTAAGCC TTCAAATTAC ATTATCAACA | 2400 |
| TGAGAGAAAT AACCAACAAA GAAGATGTTC AAAATAATAG TCCCATATCT GTAATCATAT | 2460 |
| CTACATGCAA TGTTAGTAAT TCTGAAGTTT TTTAAATTTA TGGCTATTTT TACACGATGA | 2520 |
| TGAATTTTGA CAGTTTGTGC ATTTTCTTTA TACATTTTAT ATTCTTCTGT TAAAATATCT | 2580 |
| CTTCAGATGA AACTGTCCAG ATTAATTAGG AAAAGGCATA TATTAACATA AAAATTGCAA | 2640 |
| AAGAAATGTC GCTGTAAATA AGATTTACAA CTGATGTTTC TAGAAAATTT CCACTTCTAT | 2700 |
| ATCTAGGCTT TGTCAGTAAT TTCCACACCT TAATTATCAT TCAACTTGCA AAAGAGACAA | 2760 |
| CTGATAAGAA GAAAATTGAA ATGAGAATCT GTGGATAAGT GTTTGTGTTC AGAAGATGTT | 2820 |
| GTTTTGCCAG TATTAGAAAA TACTGTGAGC CGGGCATGGT GGCTTACATC TGTAATCCCA | 2880 |
| GCACTTTGGG AGUCTGAGGG GGTGGATCAC CTGAGGTCGG GAGTTCTAGA CCAGCCTGAC | 2940 |
| CAACATGGAG AAACCCCATC TCTACTAAAA ATACAAAATT AGCTGGGCAT GGTGGGACAT | 3000 |
| GCTGGTAATC TCAGCTATTG AGGAGGCTGA GGCAGGAGAA TTGCTTGAAC CCGGGAGGCG | 3060 |
| GAGGTTGCAG TGAGCCAAGA TTGCACCACT GTACTCCAGC CTGGGTGACA AAGTCAGACT | 3120 |
| CCATCTCCAA AAAAAAAAAA AAAA | |
| Seq ID NO: 8 Protein sequence | |
| Protein Accession #: NP_055146 | |
| 1 11 21 31 41 51 | |
| \| \| \| \| \| \| | |
| NVRKPVVSTI SKGGYLQGNV NGRLPSLGNK EPPGQEKVQL KRKVTLLRGV SIIIDTIIDA | 60 |
| GIFTSPKGVL CNTGSVGMSL TIWTVCGVLS LFGALSYAEL GTTIKKSGGN YTYILEVFGP | 120 |
| LPAFVRVWVE LLIIRPAATA VISLANGRYT LEPPFIQCEI PELAIRLITA VGITVVNVLN | 180 |
| SMSVSNSARI QTFLTFCKLT AILIIIVPGV NQLIKGQTQN FKGAFSGRGS SITELPEAFY | 240 |
| YGNYAYAGWF YLNFVTEBVN NPEKTIPLAI CISNAIVTID YVLTNVAYFT TINANNLLLS | 300 |
| NAVAVTFSER LLGNFSLAVP IFVALSCFGS MNGGVFAVSN LFYVASREGN LPNILSMINV | 360 |
| RKHTPLPAVI VLNPLTMIML FSGGLGSLLN FLSFARNLFI GLAVAGLIYL RYKCPGMNRP | 420 |
| FKVPLFIPAL FSFTCLFNVA LSLYSGPFST GIDFVITLTG VPAYYLFIIN GERPEWERIN | 480 |
| SEKITRTLQI ILEVVPEEGK L | |
| Seq ID NO: 9 DNA sequence | |
| Nucleic Acid Accession #: FGENESH | |
| Coding sequence: 1 . . . 546 | |
| 1 11 21 31 41 51 | |
| \| \| \| \| \| \| | |
| ATGGCCTTGG GCAGCTCCGC CCCTGTGGCT TTGCAGGGTA ATGCCCACTT CCCTGCTGCT | 60 |
| TTCATGGCTG GCATTAAGTG TCTGTGGCTT TTCCAGGTAG TCCCCCTGGG GCTCCCCGAG | 120 |
| TTGGTGCAAA GGCTCCTGGG TGGAGCTCGA ACTGAAACTC GCTTTGTGCC CGCAGCCCTG | 180 |
| CAGCTCGCCG GTGCCCTCGA CCTGCCCGCT GGGTCCTGTG CCTTTGAAGA GAGCACTTGC | 240 |
| GGCTTTGACT CCGTGTTGGC CTCTCTGCCG TGGATTTTAA ATGAGGAAGG CCAGCAACCT | 300 |
| TTCTGGTCCT CAGGAGACAT GTCTGACTGG GACTACTGGG TTGGCTGGCG GAAGTTAATT | 360 |
| CATTCTCCTC TGAGCACTCC AGGGTGGAGC AGGCAGGTTA GGCTCCAGTT GTTCCAGCTT | 420 |
| CAGTTTGTCA AAGGCCAGAA CTTGGACGTA ACAGTGTACT GCAGGCTCCA GGGCAGTGAG | 480 |
| AAACCCTTTG AAACTGGTTC CATGGTTCCA TTCACCTTCA TGTACTGGAT CCACCATGGA | 540 |
| AAGTAG | |
| Seq ID NO: 10 Protein Sequence | |
| Protein Accession #: FGENESN | |
| 1 11 21 31 41 51 | |
| \| \| \| \| \| \| | |
| MALGSSAPVA LQDNANFPAA FMAGIKCLWL FQVVPLCLPE LVGRLLGCAR TETRFVPAAL | 60 |
| QLAGALGLPA GSCAFEESTC GFDSVLASLP WILNEECQGP FWSSGGMSGW GYWVCWRKLI | 120 |
| NSPLSTPGWS RQVRLGLFGL QFVKGGNLGV TVYCRLQCSE KPFETGSMVP FTFMYWINHG | 180 |
| K | |
| Seq ID NO: 11 DNA sequence | |
| Nucleic Acid Accession #: EOS sequence | |
| Coding sequence: 461-3286 | |
| 1 11 21 31 41 51 | |
| \| \| \| \| \| \| | |
| GCCGCCCCTG AGCAGCCTCG CCTTCGCCTC CCGCGTTTCC TGCCGTCCGC CCTCCCCCGG | 60 |
| CCCAGCTCCA GCCGCTGCCG CCTAGCACCT CCCGCCGGCA CACCGGTTCA CACCGCGCAC | 120 |
| CCCCCCGCCC GGAGGCGGCC CGCTGCGGGG CGGCCGCGCT GGAGAGAGGC GCGCGCGGAG | 180 |
| ACGCCGGCCC CCCTCTCCGC GTTTGCTCGC TTGCTCCCCG CCTCCCGCAC TCCGCTCGCT | 240 |
| CCCACCCCTT CCCGGCGTGA TTGATCCGTC ACGGGCGCCG CCGCTGCCGC CGCCGCCGCC | 300 |
| GCGGCCGTTC TGAGCCGAGC CGGAACCCTA GCCCGAGACG GACCCGGGGC CCGGGCCGGC | 360 |
| GCCATTGCGC GGCCGCCGCG GGAAGACCTT GGCGCGGGGC GGCGGGCCGG GCCAGUCCAT | 420 |
| GCGGGCCGAG TGAGCCGGCG CCCGCAGCCC GCGGCGCGGC ATGGCTTCCC CGCGGAGCTC | 480 |
| CGGGCAGCCC GGGCCGCCGC CGCCGCCGCC ACCGCCGCCC GCGCGCCTGC TACTGCTACT | 540 |
| GCTGCTGCCG CTGCTGCTGC CTCTGGCGCC CGGGGCCTGG GGCTGGGCGC GGGGCGCCCC | 600 |
| CCGGCCGCCG CCCAGCAGCC CGCCGCTCTC CATCATGGGC CTCATGCCGC TCACCAAGGA | 660 |
| GGTGGCCAAG GGCAGCATCG GGCGCGGTGT GCTCCCCGCC GTGGAACTGG CCATCGAGCA | 720 |
| GATCCGCAAC GAGTCACTCC TGCGCCCCTA CTTCCTCGAC CTGCGGCTCT ATGACACGGA | 780 |
| GTGCGACAAC GCAAAAGGGT TGAAAGCCTT CTACGATGCA ATAAAATACG GGCCTAACCA | 840 |
| CTTGATGGTG TTTGGAGGCG TCTGTCCATC CGTCACATCC ATCATTGCAG AGTCCCTCCA | 900 |
| AGGCTGGAAT CTGGTGCAGC TTTCTTTTGC TGCAACCACG CCTGTTCTAG CCGATAAGAA | 960 |
| AAAATACCCT TATTTCTTTC GGACCGTCCC ATCAGACAAT GCGGTGAATC CAGCCATTCT | 1020 |
| GAAGTTGCTC AAGCACTACC AGTGGAAGCG CGTGGGCACG CTGACGCAAG ACGTTCAGAG | 1060 |
| GTICICTGAG GTGCGGAATG ACCTGACTGG AGTTCTGTAT GGCCAGGACA TTGAGATTTC | 1140 |
| AGACACCGAG AGCTTCTCCA ACGATCCCTG TACCAGTGTC AAAAAGCTGA AGGGGAATGA | 1200 |
| TGTGCGGATC ATCCTTGGCC AGTTTGACCA GAATATGGCA GCAAAAGTGT TCTGTTGTGC | 1260 |
| ATACGAGGAG AACATGTATG GTAGTAAATA TCAGTGGATC ATTCCGGGCT GGTACGAGCC | 1320 |
| TTCTTGGTGG GAGGAGGTGC ACACGGAAGC CAACTCATCC CGCTGCCTCC GGAAGAATCT | 1380 |
| GCTTGCTGCC ATGGAGGGCT ACATTGGCGT GGATTTCGAG CCCCTGAGCT CCAAGCAGAT | 1440 |
| CAAGACCATC TCAGGAAAGA CTCCACAGCA GTATGAGAGA GAGTACAACA ACAAGCGGTC | 1500 |
| AGGCGTGGGG CCCAGCAAGT TCCACGGGTA CGCCTACGAT GGCATCTGGG TCATCGCCAA | 1560 |
| GACACTGCAG AGGGCCATGG AGACACTGCA TGCCAGCAGC CGGCACCAGC GGATCCAGGA | 1620 |
| CTTCAACTAC ACGGACCACA CGCTGGGCAG GATCATCCTC AATGCCATGA ACGAGACCAA | 1680 |
| CTTCTTCGGG GTCACGGGTC AAGTTGTATT CCGGAATGGG GAGAGAATGG GGACCATTAA | 1740 |
| ATTTACTCAA TTTCAAGACA GCAGGGAGGT GAAGGTGGGA GAGTACAACG CTGTGGCCGA | 1800 |
| CACACTGGAG ATCATCAATG ACACCATCAG GTTCCAAGGA TCCGAACCAC CAAAAGACAA | 1860 |
| GACCATCATC CTGGAGCAGC TGCGGAAGAT CTCCCTACCT CTCTACAGCA TCCTCTCTGC | 1920 |
| CCTCACCATC CTCGGGATGA TCATGGCCAG TGCTTTTCTC TTCTTCAACA TCAAGAACCG | 1960 |
| GAATCAGAAG CTCATAAAGA TGTCGAGTCC ATACATGAAC AACCTTATCA TCCTTGGAGG | 2040 |
| GATGCTCTCC TATGCTTCCA TATTTCTCTT TGGCCTTGAT GGATCCTTTG TCTCTGAAAA | 2100 |
| GACCTTTGAA ACACTTTGCA CCGTCAGGAC CTGGATTCTC ACCGTGGGCT ACACCACCGC | 2160 |
| TTTTGGGGCC ATGTTTGCAA AGACCTGGAG AGTCCACGCC ATCTTCAAAA ATGTGAAAAT | 2220 |
| GAAGAAGAAG ATCATCAAGG ACCAGAAACT GCTTGTGATC GTGGGGGGCA TGCTGCTGAT | 2200 |
| CGACCTGTGT ATCCTGATCT GCTGGCAGGC TGTGGACCCC CTGCGAAGGA CAGTGGAGAA | 2340 |
| GTACAGCATG GAGCCGGACC CAGCAGGACG GGATATCTCC ATCCGCCCTC TCCTGGAGCA | 2400 |
| CTGTGAGAAC ACCCATATGA CCATCTGGCT TGGCATCGTC TATGCCTACA AGGGACTTCT | 2460 |
| CATGTTGTTC GGTTGTTTCT TAGCTTGGGA GACCCGCAAC GTCAGCATCC CCGCACTCAA | 2520 |
| CGACAGCAAG TACATCGGGA TGAGTGTCTA CAACGTGGGG ATCATGTGCA TCATCGGGGC | 2580 |
| CGCTGTCTCC TTCCTGACCC GGGACCAGCC CAATGTGCAG TTCTGCATCG TGGCTCTGGT | 2640 |
| CATCATCTTC TGCAGCACCA TCACCCTCTG CCTGGTATTC GTGCCGAAGC TCATCACCCT | 2700 |
| GAGAACAAAC CCAGATGCAG CAACGCAGAA CAGGCGATTC CAGTTCACTC AGAATCAGAA | 2760 |
| GAAAGAAGAT TCTAAAACGT CCACCTCGGT CACCAGTGTG AACCAAGCCA GCACATCCCG | 2820 |
| CCTGGAGGGC CTACAGTCAG AAAACCATCG CCTGCGAATG AAGATCACAG AGCTGGATAA | 2880 |
| AGACTTGGAA GAGGTCACCA TGCAGCTGCA GGACACACCA GAAAAGACCA CCTACATTAA | 2940 |
| ACAGAACCAC TACCAAGAGC TCAATGACAT CCTCAACCTG GGAAACTTCA CTGAGAGCAC | 3000 |
| AGATGGAGGA AAGGCCATTT TAAAAAATCA CCTCGATCAA AATCCCCAGC TACAGTGGAA | 3060 |
| CACAACAGAG CCCTCTCGAA CATGCAAAGA TCCTATAGAA GATATAAACT CTCCAGAACA | 3120 |
| CATCCAGCGT CGGCTGTCCC TCCAGCTCCC CATCCTCCAC CACGCCTACC TCCCATCCAT | 3180 |
| CGGAGGCGTG GACGCCAGCT GTGTCAGCCC CTGCGTCAGC CCCACCGCCA GCCCCCGCCA | 3240 |
| CAGACATGTG CCACCCTCCT TCCGAGTCAT GGTCTCGGGC CTGTAAGGGT GGGAGGCCTG | 3300 |
| GGCCCGGGGC CTCCCCCGTG ACAGAACCAC ACTGGGCAGA GGGGTCTGCT GCAGAAACAC | 3360 |
| TGTCGGCTCT GGCTGCGGAG AAGCTGGGCA CCATGGCTGG CCTCTCAGGA CCACTCGGAT | 3420 |
| GGCACTCAGG TGGACAGGAC GGGGCAGGGG GAGACTTGGC ACCTGACCTC GAGCCTTATT | 3480 |
| TGTGAAGTCC TTATTTCTTC ACAAAGAAGA GGAACGGAAA TGGGACGTCT TCCTTAACAT | 3540 |
| CTGCAAACAA GGAGGCGCTG GGATATCAAA CTTGCAAAAA AAAAAAAAAA AAAAAAAAAA | 3600 |
| CAAAAAAACT AGACAAGGAG AGAGGCACTA GAACTCCAGC TGGAAGTCAC GGAGTGGCTC | 3660 |
| GAGCAGCCTT GGGAAGAGGC AAGGAGCTTC TGAAGAAACT GCCTCTGCAC ACACATCACT | 3720 |
| GGCTGTGACC CCTCAGGCTA GCCCTTCTCC ACTCTGGGGG AGGAGGTGGG AAGGGCCACC | 3780 |
| AGGCCCCCAG CTGCCAGGCC AGCTGACCCC AGCCTTCCTG GAACAGGGAG TCTGCAGGAG | 3840 |
| CGCAGACAGG CACAGCCCTC GACCAGGCAG GCCGAGGGCT GCGGCACTGG AGCAGGCTGA | 3900 |
| CTTACATGCT CCACATGGGA CCTGTGTCAC CCAATGAGAT GTTTGTTACT CTGGTAAATG | 3960 |
| CCACACGTTA ACACAATAAC ACCCATTCCT CGGACCGTGG GGATTTAGGG CACGTCACTG | 4020 |
| CAGACACGCT CTGCAGCATT CACCGACAGT CTGTCATGCA CCCACCACGT TGGCCATGTC | 4080 |
| CTTGTGTTCC TATCGGATGC TCCCAGTAAC CAGGGGCACC ACCCGAGCTA ATCATGGAAT | 4140 |
| GTCTGTTCCC AGCAAACACG ATAAAGAAAG ATTGTGCACT TTAACCTCTC TCATCAGGGC | 4200 |
| CCAAGGGCTG GCTGGGATTT TTTTTTTTTT TTTCCCACTA ACTTTGTTTC TCACCAAACT | 4260 |
| GAATTGGAGG CACTCTGCTA AAAGACATCC CCGTAGACAT AGGGGAGAGA GTTGCTGGCT | 4320 |
| CAGGGCTTCC CTTGGCTTCC AGAAGGCAGC CTTCCATCCA GACAAGCCAG TGAGCTCTCC | 4380 |
| CCTTCGGATC ACTGGGGTGA TCAGTCAGCA GATTGATTCT CATTCATAAG ATCATTCCTC | 4440 |
| CCTTTAAATT GAGCCCCTAA GAGCACTGGC CTGGGAGTCA GACAGACCTG GGTTCAAGTC | 4500 |
| CTCAGTCCCC TGCCCACTCC CTACGTGACT TTGATCAGGT CACTAGTGTC TCTCTGAGCC | 4560 |
| TCAGTTTCCC CTCTGTAACT TGGGGTTGAA CTAAAACACC TGTCCTGCCT ACCTCACAAG | 4620 |
| GTCACTCTGA GGATTGAAAC TTGATCTTGT CCAGGAAAGC TTTGTACCAA ACAGTGAAGC | 4600 |
| CGCCCTGATC CGTGAGGTAT GACTATGACT CTGACCTTCA GCCCTCCCTA CAGCCGGGGG | 4740 |
| TGTGGCCCAG AGAAGCTTCC AGCACAGCCC TCTACCCAGA ACATCCGGGC TGGAGGGAGG | 4800 |
| CTCCCAGTGA CTTTTCTGAC ATTCCTAGAC AGGTTCATTC TTTGCTCAAG AAAGGCCTGA | 4860 |
| ATGACAATGT CCAGGATGTC TGCACAACTG AGCAGCTCGC TCACTCCCTA AAGAAACCTA | 4920 |
| TTGGCAGCTT CAACAGGCAG GCAATAATCT CTTCCCAGAA CCACTGCAGT CAGGAATAAA | 4980 |
| CTGTTTTCTC CACCAGGCTT TGACAAAAGG GCCCACAGGA ATCTTACCAA TGCCAACATT | 5040 |
| TCAAAGCACC CTATTTCACG TAGCATAGCT TTCTGCTCCC CTTCCCCAAA GAGAGGTTAT | 5100 |
| GGAGGTACTG TAGCTTTTAG GGAAAAAAAA ATGTTAACAC ATCACAGGTC AAGTTGAAGT | 5160 |
| CATTCTCTGT TTAGGCACTA AAAATCGGTG TTGTCACTCA CTGTGTATTA CCAGTATTTA | 5220 |
| CTTGCTTTCT TGATTTCACC AAAACCAAAT TTAATTTAAA GGACCACATT AATTTTTCAA | 5280 |
| AGGGAAAGAG ACAATTAATT GTACATAATG TATACACACA CACAAAAAAA AATACCTGTA | 5340 |
| GAAATATTAT TCCAGCATAG CAGGAAAACA AACAAAAGTA TTGGACTGTC GGAGGTGAGC | 5400 |
| CTGTGCGTCT GTAACCCTTT GTGACTCCTG AGCGTGCGCT GTCTTCTAGG TTAACTCACG | 5460 |
| AAGTACATTC TCTGTCTTAC TGATACTGTA GGTTCACCCA TTTTTTTTTA ATTTCCTCGC | 5520 |
| AAATAACAAG ACCCACAGAA GTGACTCTAG CTACTTAATG GTTCTGTTCT TTTATATGCA | 5580 |
| GCAAACACAC CGTCCATTTC TGAAGAGGCT TCGGCCTGAA CGCATTTTCC AATGATGTTA | 5640 |
| GTGCACAAAA CGCTTTAAAT TAGACTGGAA CTGCCAGAAT CAAATGTAAA TGAGGAATTT | 5700 |
| CTCGTACCCC TACTGCATGG TATCGATTTT TAATAAATTG TTGCAAATTT GTTTTTATGA | 5760 |
| ATAAAAGGAA AAAACCTGTC GTCTTT | |
| Seq ID NO: 12 Protein sequence: | |
| Protein Accession #: EOS sequence | |
| 1 11 21 31 41 51 | |
| \| \| \| \| \| \| | |
| MASPNSSGQP GPPPPPPPPP ARLLLLLLLP LLLPLAPGAW GWARGAPRPP PSSPPLSIMG | 60 |
| LNPLTKEVAK GSIDRGVLPA VELAIEQIRN ESLLEPYFLG LRLYGTECGN AKGLKAFYGA | 120 |
| IKYGPNNLMV PGGVCPSVTS IIAESLQGWN LVQLSFAATT PVLAGKKKYP YFFRTVPSGN | 180 |
| AVNPAILKLL KNYQNKRVGT LTQGVQRFSE VRNDLTGVLY GEGIEISGTE SFSNGPCTSV | 240 |
| KKLKGNGVRI ILGQFGQNMA AKVFCCAYEE NNYGSKYQWI IPGWYEPSWW EQVHTEANSS | 300 |
| RCLRKNLLAA MEGYIDVGFE PLSSKQIKTI SGKTPQQYER EYNNKRSGVG PSKFNGYAYG | 360 |
| GIWVIAKTLQ RANETLNASS RNQRIQGFNY TGNTLGRIIL NAMNETNEEG VTGQVVFRNG | 420 |
| ERNGTIKPTQ FQGSREVKVG EYNAVAGTLE IINDTIRFQG SEPPKGKTII LEQLRKISLP | 480 |
| LYSILSALTI LGMIMASAFL FFNIKNRNQK LIKNSSPYMN NLIILGGMLS YASIFLFGLG | 540 |
| GSFVSEKTPE TLCTVRTWIL TVGYTTAFGA MPAKTWRVNA IFKNVKNKKK IIKGQKLLVI | 600 |
| VGGMLLIDLC ILICWQAVGP LRRTVEKYSM EPGPAGRGIS IRPLLENCEN TNMTIWLGIV | 660 |
| YAYKGLLMLF GCFLAWETRN VSIPALNGSK YIDMSVYNVG IMCIIDAAVS FLTRGQPNVQ | 720 |
| FCTVALVIIF CSTITLCLVF VPKLITLRTN PGAATQNRRF QFTQNQKKEG SKTSTSVTSV | 780 |
| NQASTSRLEG LQSENNRLRM KITELGEGLE EVTMQLQGTP EKTTYIKQNN YQELNGILNL | 840 |
| GNFTESTGGG KAILKNHLGQ NPQLQWNTTE PSRTCKGPIE GINSPEHIQR RLSLQLPILN | 900 |
| NAYLPSIDGV GASCVSPCVS PTASPRNRNV PPSFRVNVSG L | |
| Seq ID NO: 13 DNA sequence | |
| Nucleic Acid Accession #: NM_001565.1 | |
| Coding sequence: 67-363 | |
| 1 11 21 31 41 51 | |
| \| \| \| \| \| \| | |
| GAGACATTCC TCAATTGCTT AGACATATTC TGAGCCTACA GCAGAGGAAC CTCCAGTCTC | 60 |
| AGCACCATGA ATCAAACTGC GATTCTGATT TGCTGCCTTA TCTTTCTGAC TCTAAGTGGC | 120 |
| ATTCAAGGAG TACCTCTCTC TAGAACCGTA CGCTGTACCT GCATCAGCAT TAGTAATCAA | 180 |
| CCTGTTAATC CAAGGTCTTT AGAAAAACTT GAAATTATTC CTGCAAGCCA ATTTTGTCCA | 240 |
| CGTGTTGAGA TCATTGCTAC AATGAAAAAG AAGGGTGAGA AGAGATGTCT GAATCCAGAA | 300 |
| TCGAAGGCCA TCAAGAATTT ACTGAAAGCA GTTAGCAAGG AAATGTCTAA AAGATCTCCT | 360 |
| TAAAACCAGA GGGGAGCAAA ATCGATGCAG TGCTTCCAAG GATGGACCAC ACAGAGGCTG | 420 |
| CCTCTCCCAT CACTTCCCTA CATGGAGTAT ATGTCAAGCC ATAATTGTTC TTAGTTTGCA | 480 |
| GTTACACTAA AAGGTGACCA ATGATGGTCA CCAAATCAGC TGCTACTACT CCTGTAGGAA | 540 |
| GGTTAATGTT CATCATCCTA AGCTATTCAG TAATAACTCT ACCCTGGCAC TATAATGTAA | 600 |
| GCTCTACTGA GGTGCTATGT TCTTAGTGGA TGTTCTGACC CTGCTTCAAA TATTTCCCTC | 660 |
| ACCTTTCCCA TCTTCCAAGG GTACTAAGGA ATCTTTCTGC TTTGGGGTTT ATCAGAATTC | 720 |
| TCAGAATCTC AAATAACTAA AACGTATGCA ATCAAATCTG CTTTTTAAAG AATGCTCTTT | 780 |
| ACTTCATGGA CTTCCACTGC CATCCTCCCA AGGGGCCCAA ATTCTTTCAG TGGCTACCTA | 840 |
| CATACAATTC CAAACACATA CAGGAAGGTA GAAATATCTG AAAATGTATG TGTAAGTATT | 900 |
| CTTATTTAAT GAAAGACTGT ACAAAGTATA AGTCTTAGAT GTATATATTT CCTATATTGT | 960 |
| TTTCAGTGTA CATGGAATAA CATGTAATTA AGTACTATGT ATCAATGAGT AACAGCAAAA | 1020 |
| TTTTAAAAAT ACAGATAGAT ATATGCTGTG CATGTTACAT AAGATAAATG TGCTGAATGG | 1080 |
| TTTTCAAATA AAAATGAGGT ACTCTCCTGC AAATATTAAG | |
| Seq ID NO: 14 Protein sequence: | |
| Protein Accession #: NP_001556.1 | |
| 1 11 21 31 41 51 | |
| \| \| \| \| \| \| | |
| MNQTAILICC LIFLTLSGIQ GVPLSRTVRC TCISISNQPV NPRSLEKLEI IPASQFCPRV | 60 |
| EIIATNKKKG EKRCLNPESK AIKNLLKAVS KENSKRSP | |
| Seq ID NO: 15 DNA sequence | |
| Nucleic Acid Accession #: Eos sequence | |
| Coding sequence: 241 . . . 1272 | |
| 1 11 21 31 41 51 | |
| \| \| \| \| \| \| | |
| GCGCAGACGC CCCAGCCCCC CACCGCCCCC AAAGGGGCGA GCGACGCCAA GCTCTGCGCT | 60 |
| CTCTACAAAG AGGCCGAGCT GCGCCTGAAG GGCAGCAGCA ACACCACGGA GTGTGTTCCC | 120 |
| GTGCCCACCT CCGAGCACGT GCCCGAGATC GTGGGCAGGC AAGGCTGCAA GATTAAGGCC | 180 |
| TTGAGGGCCA AGACCAACAC CTACATCAAG ACACCGGTGA GGGGCGAGGA ACCAGTGTTC | 240 |
| ATGGTGACAG GGGGACGGGA GGACGTGGCC ACAGCCCGGC GGGAAATCAT CTCAGCAGCG | 300 |
| GAGCACTTCT CCATGATCCG TGCCTCCCGC AACAAGTCAG GCGCCGCCTT TGGTGTGGCT | 360 |
| CCTGCTCTGC CCGGCCAGGT GACCATCCGT GTGCGGGTGC CCTACCGCGT GGTGGGGCTG | 420 |
| GTGGTGGGCC CCAAAGGGGC AACCATCAAG CCCATCCAGC AGCAAACCAA CACATACATT | 480 |
| ATCACACCAA GCCGTGACCG CGACCCCGTG TTCCAGATCA CGGGTCCCCC AGGCAACGTG | 540 |
| GACCGTGCGC GCGAGGAGAT CGAGACGCAC ATCGCGGTGC GCACTGGCAA GATCCTCGAG | 600 |
| TACAACAATG AAAACGACTT CCTGGCGGGG AGCCCCGACG CAGCAATCGA TAGCCGCTAC | 660 |
| TCCGACGCCT GGCGGGTGCA CCAGCCCGGC TGCAAGCCCC TCTCCACCTT CCGGCAGAAC | 720 |
| AGCCTGGGCT GCATCGGCGA GTGCGGACTG GACTCTGGCT TTGAGGCCCC ACGCCTGGGT | 780 |
| GAGCAGGGCG GGGACTTTGG CTACGGCGGG TACCTCTTTC CGGGCTATGG CGTGGGCAAG | 840 |
| CAGGATGTGT ACTACGGGGT GGCCGAGACT AGCCCCCCGC TGTGGGCGGG CCAGGAGAAC | 900 |
| GCCACGCCCA CCTCCGTGCT CTTCTCCTCT GCCTCCTCCT CCTCCTCCTC TTCCGCCAAG | 960 |
| GCCCGCGCTG GGCCCCCGGG CGCACACCGC TCCCCTGCCA CTTCCGCGGG ACCCGAGCTG | 1020 |
| GCCGGACTCC CGAGGCGCCC CCCGGGAGAG CCGCTCCAGG GCTTCTCTAA ACTTGGTGGG | 1080 |
| GGCGGCCTGC GGAGCCCCGG CGGCGGGCGG GATTGCATGG TCTGCTTTGA GAGCGAAGTG | 1140 |
| ACTGCCGCCC TTGTGCCCTG CGGACACAAC CTGTTCTGCA TGGAGTGTGC AGTACGCATC | 1200 |
| TGCGAGAGGA CGGACCCAGA GTGTCCCGTC TGCCACATCA CAGCCACGCA AGCCATCCGA | 1260 |
| ATATTCTCCT AAGCCCCGTG CCCCATGCCT CCGGGGCCCA CTCCACTGGG CCCACCCTGG | 1320 |
| ACCTGTTTTC CACTAAAGCC TTTTGGAAAG CGGTGATTTG AGGGGCAAGG TGCTTAGAGA | 1380 |
| TACTCGCTCG CTGGGGAAGG GGGGAGGGAG GCAGTGGTGG CTGGAGGGTG CGCCACTTTC | 1440 |
| AGAGCCTCTG GTCACCCTGT CCTGGAAAGA TTGGGAGGGG GCCAGACTGA AAATTTTACT | 1500 |
| AGAGTTACAA CTCTGATACC TCAACACACC CTTAAATCTG GAAGCAGCTA AGAGAAACTT | 1560 |
| TTGTTTTGCC AGAGGTGGCC ACTAAGGCAT TCTGACGCCC TCTGCCCACC TCCCCCGCTG | 1620 |
| TGTGTCACTC CACCCCTTCT TCCGAGGAGG GGGTGGGTAA AAGGGAGAGG GAGAATTACC | 1680 |
| ACCTGTATCT AGAGGTGCTC TTTGCAATCC CTAAGCCCTC TGGTCCTGAC CTCCGACCTC | 1740 |
| CTAACATGAC CCTTTACCTC CCACCCCACC CCCATATCCT GTTTGGGAAA CTGTCACCAG | 1800 |
| TTTCCAGCAG TGTAAGGGAG TTGGAGTCCT ATCAGAAGTT GCATAGATCT TCTAGGGGTT | 1860 |
| GGGGAGAGAA GCATGTCAAT CGTTTCTGTG GCTGAAAGGC TCAGAAGCCA TCTGTCCCCA | 1920 |
| CAAAGCTGGG CTAGAGGAAT CTGGAGAGGA GTCCTCCTCT CTGCCCCTGT CCCCTGCAGT | 1980 |
| GTTTCCCTTC ACTCTCTCCG CCTATCTTCC CTTCCTTTGG GATCTTCCCT TTCCTCAACT | 2040 |
| CTTTCCTTTC CCTCCAGCTC TTTGCTTTGC TTTCTTTTGG TGGCTGTCAC TCCCAGCTCT | 2100 |
| GTCTTGTTCC TTGTCTTTGT CTTTCTTCCC TTCCCCCTGC CCCTGCCCCT ACCAGCCCAG | 2160 |
| CTTTGGGGAC ACCATCCTTC TGGGGAGAAG TAGGGGGAGG AATATTTGGA TGGTCCCTCC | 2220 |
| ATTCCTCTTC AGGCATCTGG AGGCCCTCTC CCCCACTCCT CCAAAGAAAC ATCTCAAATT | 2280 |
| ATTGATGGAA TGTATCCCCA TTCTCAGTGA AAATGTGAGG AGGGGACTAA TACTGGGGTA | 2340 |
| AAGGGTCAAA CCCCCACCTT CATCACTATG GGCATTATAT TTAGGGAGTA GTTCTTGGGC | 2400 |
| TGGATTTTCT GGTTGTGGAA GTGGGGGCGC CAGAGTAGTG TGTCTGCTAT TTAAAGGAGC | 2460 |
| AGGAAAGGGC GTGAGGCAGG AGGAGAGACT GGTGGAGGGA AGAGCTGCTC CTCCCATGCA | 2520 |
| GTGCCCGACT CCCTGCACCC CTCTCAACCT GACCTGAACC TTTATTGAAT CCTTATTAGC | 2580 |
| TTGAATCCTT ATTAGCTTGA ATCCTCCATG CAAATCATGG AGTCTGTGTC CCACCTGATG | 2640 |
| TGGTTGAGGA GAAGCCAGGT CTTCAAAGAG GGGTCAGCCT GGGGCAAAGC AGGACTGGGG | 2700 |
| GGAGGTGGGC AGCAGGGCCT ATTCTGAGAA TCACATATTG TTACAGGCCT TGCACCCCCT | 2760 |
| TTGCTGCTTC CCTCCTGCTC ATTTGGGGCT GCCACCAGCT CTCCACCCTC CTGGTTCCGC | 2820 |
| TGGCCGGGCC AAGAGAGGAT GGAGGGATGG GAGTCCCAGG AGATCCTTGT AAATAGTGGG | 2880 |
| GTGGGACTGT TCTGAGTGAT CACCCGAGCA CTTAAAGCTC CAGAGTCCCA TTCTTCCTGG | 2940 |
| ATGGAGCAGG TGGAGGTGCA GAGGGGATTT CCTCCTCTCC TTCCTCCTGT CGAGAATTAA | 3000 |
| CACCTCTCCA CAGCCTTCCC CTCCAGAACA CCAGCCAGGG AGGGGTGGGG AAGGAGGTCA | 3060 |
| CAGCCAAGAA AACTGCCCTG TGACGACTTC CCTCCTTCCC GCCTATGTGA GCCATCCTGA | 3120 |
| GATGTCTGTA CAATAGAAAC CAAACCAAAT GGGCACCCTC GGTTGCCGGG GGGCAGGTGG | 3180 |
| GGAGGGGGGT GGGAAGAAGG GATGTCTGTC TGTCGTCCCC CTCCCCCTCT CCACTCTTTA | 3240 |
| CCCACAAAGG CAGAAGACTG TTACACTAGG GGGCTCAGCA AATTCAATCC CACCCTTACC | 3300 |
| AATTGAGCCA AACCTAGAAA CAAACACAAA ACACGAATAG TGAGAGACAA AATAGAGGAG | 3360 |
| AGAAAGAGAG CATGAGAGGG AGCGAGACAG GCGACCAACA CAGAGGAGAG AAAACAAAAA | 3420 |
| TAGCAAAAAA AAAAAAAAAA AGCAGTTCTT TATAATTTAA TATTCTATTT TAATAAAGGC | 3480 |
| GTTTATTACC ATATAAATGT AGCAAAGAAC CTGGGCTAAT ATGAAAAAAA AAGACTTTTT | 3540 |
| ATTAGGTAAT TTATTATATG AAAAGGATAT TTTATTTTAT GATAAAGTGA TCCTTAAAAA | 3600 |
| AATAAAAAAA CTTTAGAAGG TTTAGAATAT ATGTAGGGAG AGAAGAAGAA AAAAATACAT | 3660 |
| TTGTATTCAG AGTTAAATCT TAAAAAAAAA AAGTGTTTTT AATATATGTT TGGGTTTACG | 3720 |
| TTGCTTTTTT CCCCCACTTT TTTTTTGGGG AGGAATGTCA TTTGCTTTTC TTGGGGGAGC | 3780 |
| ATCCCGGGGG TGAATGGTGG AGAGAGGAUC TGGGGGAACC CGGTCCCTCC TGGGACCCTT | 3840 |
| CCAGTAGATT GGATTTCACT CCATGGACTC CTCCTCCCCT CTCCCCCTCC CCCTCAGGGG | 3900 |
| AGCCGGCAGA GCCAAACAAA GAAAGGGATT AACAAGAAAG GAAGAAGCTG TAGGACTAAG | 3960 |
| GACTGAGGAT CCTGGGGTGT CCCCCACCAC TTTCCCCTGC CCTGTCGCAG GGGCAAGTGA | 4020 |
| GGAGGGGGAA TCCAGAATTA AGGCCTAGCA GGCCTATAGG AACCCTCAGA GATGTGTGAG | 4080 |
| ATTTAAGAGA TCTAGATTTT TTTTTAACCA AAAACAAGAG AGAAAGAGAA GAAAAAGAGA | 4140 |
| AACCGAGGGG TTTAAAAGAA AAGAATACTA CAAAATAATA ATTATTAATA ATAATAATTC | 4200 |
| AAATTTATTT CATATAATCC TAGAGAGAGA AAGAAACAAT TACTAGTTAC TTAGTAGACA | 4260 |
| ATATTAAGAT AGCTTAAAGT TTAGTAGCAT TGAGGGCCCC TGGGTCCAGT AGAATGTATA | 4320 |
| AAAGTTGTAA GGAAAAGATA AATAGAGGAG GGAAGTGGCT GAGTCCACCC TGAGTTGCCC | 4380 |
| AATCTTCAGA TACCAGGGTT GGATCAGGTT GCTAGTTTAA GATTGGGAGC TTCCAGTCTG | 4440 |
| CTGGGGTTGA TTCTGAGAAT CCTTGGATTT TTAAATTGTA GGACAAAGAA ATGAGGGGTT | 4500 |
| CATTTCCCAG GGTCTTGGAA AGGATGCACA CTGATCATCT CAATAAGACA GGGGCTGGGT | 4560 |
| TGGGGGCAGC AGAGGAGGCC AAGCACATTC ACCTGCACCC CTAGTACCTG GGCAGCCCAT | 4620 |
| ACTCCAATGT GGTATGTCCC CTCCTGGGGC TCCCAGCTCA AACCCTCCCA TGCCTGCTTC | 4680 |
| CCCCAGGCCT AACTGAGGAA GTCCTTCTTG AAGTGTGACC TCGGTCCACT TCTCTACAGA | 4740 |
| TTGATTTAAG AGCCTGGGAA GTCATTCCAC AAACAGACAC ACATGCACAC ACGCTTCTCA | 4800 |
| CCTTCAGAGC TTCAAGAGCA CTGAGGCGAT CAGTCCCCTA CCCCTGTTCC CATCCAGCTT | 4860 |
| TCCACTTAGC TTTGACCTCC ATGGCAGCAG TAGCAGTAAC AATCTCAGTA ATTGTTCTTT | 4920 |
| AAAGCTGACT CGTTCTTCAC CTACTTGCAA AGTGCTTTCT TGTCTCATAA AAGTTAGATT | 4980 |
| CCAAGAAGGA CTTCCCACGG AGTGGAGTGG AAACACTGTC CTTGAAGGCC TGGGAGAAAG | 5040 |
| GCATCCCCAT GGGCACAGAG GCTGGGGAAA GGGACAGGGA CTTTGGGTGA CCCTAACCCT | 5100 |
| GACCCTCTGC TCCAGTTCAC CTCCATCTAT ATGTGTTCAG GTAGGGGTCA TCTACTGTAC | 5160 |
| CCTGGCCTGG GAACACATTG CCCTCCCCAC ACAAAACTGG AGGGCTTGGC TTCTGCGTGT | 5220 |
| GAGAAATCAA CATTTTTAAA GCACTTGCCT TCTACCAACC CCAGCTTGCA ATCACTGGGC | 5280 |
| CTTCCCCTCC TATCCAAGGG GTTGGAGGGG CCCCTTGGCT CTCCTTTTGG CACGAGCAGC | 5340 |
| CTGCTTCATT ACACCAATGA CTCTGCCATC CCCCTCCCTG GCCCTAGACC CCAAACACAT | 5400 |
| CTCCCTCTAC CCAATTTACT CTTCTCGCCC CACCTAGGGA CAGATTCCCC CTGCTCTTTT | 5460 |
| TGTCCTAGAA ACCCCGCTAG TTTGGGATGG TAGCGTCTGG GGTGGGGAGG GCTTCCCCTT | 5520 |
| CCCCACTCGA GGGTGCGGGT GGGGAAGGGG GGGTGGGTGG AGACAGCCCT GGGGCAGGGA | 5580 |
| GGATGGTCTC TCCACTGTAG AAAGTAGAGT AGGATTGTGG TCAGACTTAA TTTGAGGCAT | 5640 |
| CTAGTGAAGA CACGTACAAA TCCACCAAGG AAAAAGATTT CAAAAGCAAA ATAAAAGCGG | 5700 |
| GAAATAAAAC AGACCCAAGA ATAATCAAGT CAPAGTGATG TTGCACAAAA TGCAGAGAAA | 5760 |
| CCAAGAAGGG GGAGGGTTAA TGTATTAAAT GTGCTATTAA GAACTTAATT TTATTAAAAG | 5820 |
| TACTATTACT TAAGGCTC | |
| Seq ID NO: 16 Protein Sequence | |
| Protein Accession #: XP_044166 | |
| 1 11 21 31 41 51 | |
| \| \| \| \| \| \| | |
| MVTGRNEGVA TARREIISAA EHFSMIRASR NKSGAAFGVA PALPGQVTIR VRVPYRVVGL | 60 |
| VVGPKGATIK RIQQQTNTYI ITPSRGRGPV FEITGAPGNV ERAREETETH IAVRTGKILE | 120 |
| YNNENGFLAG SPGAAIDSRY SGAWRVHQPG CRPLSTFRQN SLGCIDECGV GSGFEAPRLG | 180 |
| EQGGGFGYGG YLFPGYGVGK QGVYYGVAET SPPLWAGQEN ATPTSVLFSS ASSSSSSSAK | 240 |
| ARAGPPGAHR SPATSAGPEL AGLPRRPPGE PLQGFSKLGG GGLRSPGGGR GCMVCFESEV | 300 |
| TAALVPCGNN LFCMECAVRI CERTGPECPV CHITATQAIR IFS 343 | |
| Seq ID NO: 17 DNA sequence | |
| Nucleic Acid Accession #: NM_005940 | |
| Coding sequence: 23-1489 | |
| 1 11 21 31 41 51 | |
| \| \| \| \| \| \| | |
| AAGCCCAGCA GCCCCGGGGC GGATGGCTCC GGCCGCCTGG CTCCGCAGCG CGGCCGCGCG | 60 |
| CGCCCTCCTG CCCCCGATGC TGCTGCTGCT GCTCCAGCCG CCGCCGCTGC TGGCCCGGCC | 120 |
| TCTGCCGCCG GACGTCCACC ACCTCCATGC CGAGAGGAGG GGGCCACAGC CCTGGCATGC | 180 |
| AGCCCTGCCC AGTAGCCCGG CACCTGCCCC TGCCACGCAG GAAGCCCCCC GGCCTGCCAG | 240 |
| CAGCCTCAGG CCTCCCCGCT GTGGCGTGCC CGACCCATCT GATGGGCTGA GTGCCCGCAA | 300 |
| CCGACAGAAG AGGTTCGTGC TTTCTGGCGG GCGCTGGGAG AAGACGGACC TCACCTACAG | 360 |
| GATCCTTCGG TTCCCATGGC AGTTGGTGCA GGAGCAGGTG CGGCAGACGA TGGCAGAGGC | 420 |
| CCTAAAGGTA TGGAGCGATG TGACGCCACT CACCTTTACT GAGGTGCACG AGGGCCGTGC | 480 |
| TGACATCATG ATCGACTTCG CCAGGTACTG GCATGGGGAC GACCTGCCGT TTGATGGGCC | 540 |
| TGGGGGCATC CTGGCCCATG CCTTCTTCCC CAAGACTCAC CGAGAAGGGG ATGTCCACTT | 600 |
| CGACTATGAT GAGACCTGGA CTATCGGGGA TGACCAGGGC ACAGACCTGC TGCAGGTGGC | 660 |
| AGCCCATGAA TTTGGCCACG TGCTGGGGCT GCAGCACACA ACAGCAGCCA AGGCCCTGAT | 720 |
| GTCCGCCTTC TACACCTTTC GCTACCCACT GAGTCTCAGC CCAGATGACT GCAGGGGCGT | 780 |
| TCAACACCTA TATGGCCAGC CCTGGCCCAC TGTCACCTCC AGGACCCCAG CCCTGGGCCC | 840 |
| CCAGGCTGGG ATAGACACCA ATGAGATTGC ACCGCTGGAG CCAGACGCCC CGCCAGATGC | 900 |
| CTGTGAGGCC TCCTTTGACG CGGTCTCCAC CATCCGAGGC GAGCTCTTTT TCTTCAAAGC | 960 |
| GGGCTTTGTG TGGCGCCTCC GTGGGGGCCA GCTGCAGCCC GGCTACCCAG CATTGGCCTC | 1020 |
| TCGCCACTGG CAGGGACTGC CCAGCCCTGT GGACGCTGCC TTCGAGGATG CCCAGGGCCA | 1080 |
| CATTTGGTTC TTCCAAGGTG CTCAGTACTG GGTGTACGAC GGTGAAAAGC CAGTCCTGGG | 1140 |
| CCCCGCACCC CTCACCGAGC TGGGCCTGGT GAGGTTCCCG GTCCATGCTG CCTTGGTCTG | 1200 |
| GGGTCCCGAC AAGAACAAGA TCTACTTCTT CCGAGGCAGG GACTACTGGC GTTTCCACCC | 1260 |
| CAGCACCCGG CGTGTAGACA GTCCCGTGCC CCGCAGGGCC ACTGACTGGA GAGGGGTGCG | 1320 |
| CTCTGAGATC GACGCTGCCT TCCAGGATGC TGATGGCTAT GCCTACTTCC TGCGCGGCCG | 1380 |
| CCTCTACTGG AAGTTTGACC CTGTGAAGGT GAAGGCTCTG GAAGGCTTCC CCCGTCTCGT | 1440 |
| GGGTCCTGAC TTCTTTGGCT GTGCCGAGGC TGCCAACACT TTCCTCTGAC CATGGCTTGG | 1500 |
| ATGCCCTCAG GGGTGCTGAC CCCTGCCAGG CCACGAATAT CAGGCTAGAG ACCCATGGCC | 1560 |
| ATCTTTGTGG CTGTGGGCAC CAGGCATGGG ACTGAGCCCA TGTCTCCTGC AGGGGGATGG | 1620 |
| GGTGGGGTAC AACCACCATG ACAACTGCCG GGAGGGCCAC GCAGGTCGTG GTCACCTGCC | 1680 |
| AGCGACTGTC TCAGACTGGG CAGGGAGGCT TTGGCATGAC TTAAGAGGAA GGGCAGTCTT | 1740 |
| GGGACCCGCT ATGCAGGTCC TGGCAAACCT GGCTGCCCTG TCTCATCCCT GTCCCTCAGG | 1600 |
| GTAGCACCAT GGCAGGACTG GGGGAACTGG AGTGTCCTTG CTGTATCCCT GTTGTGAGGT | 1860 |
| TCCTTCCAGG GGCTGGCACT GAAGCAAGGG TGCTGGGGCC CCATGGCCTT CAGCCCTGGC | 1920 |
| TGAGCAACTG GGCTGTAGGG CAGGGCCACT TCCTGAGGTC AGGTCTTGGT AGGTGCCTGC | 1980 |
| ATCTGTCTGC CTTCTGGCTG ACAATCCTGG AAATCTGTTC TCCAGAATCC AGGCCAAAAA | 2040 |
| GTTCACAGTC AAATGGGGAG GGGTATTCTT CATGCAGGAG ACCCCAGGCC CTGGAGGCTG | 2100 |
| CAACATACCT CAATCCTGTC CCAGGCCGGA TCCTCCTGAA GCCCTTTTCG CACCACTGCT | 2160 |
| ATCCTCCAAA GCCATTGTAA ATGTGTGTAC AGTGTGTATA AACCTTCTTC TTCTTTTTTT | 2220 |
| TTTTTAAACT GAGGATTGTC ATTAAACACA GTTGTTTTCT | |
| Seq ID NO: 18 Protein sequence: | |
| Protein Accession #: NP_005931.1 | |
| 1 11 21 31 41 51 | |
| \| \| \| \| \| \| | |
| MAPAAWLRSA AARALLPPML LLLLQPPPLL ARALPPGVNN LNAERRGPQP WHAALPSSPA | 60 |
| PAPATQEAPR PASSLRPPRC GVPGPSGGLS ARNRQKRFVL SGGRWEKTGL TYRILRPPWQ | 120 |
| LVQEQVRQTM AEALKVWSGV TPLTFTEVHE GRAGTMIDFA RYWNGGGLPF GGPGGILAHA | 180 |
| FFPKTNREGG VHFGYGETWT IDGGQGTGLL QVAAHEFGHV LGLQHTTAAK ALMSAFYTFR | 240 |
| YPLSLSPGGC RGVGNLYGGP WPTVTSRTPA LGPQAGIDTN RIAPLEPUAP PGACEASEGA | 300 |
| VSTIRGELFF FKAGFVNRLR GGQLQPGYPA LASRNWQGLP SPVGAAFEGA QGHIWFFQGA | 360 |
| QYNVYGGEEP VLGPAPLTEL GLVRFPVHAA LVWGPEKNKI YPPRGRGYWR FNPSTRRVDS | 420 |
| PVPRRATGWR GVPSETGAAF GGAGGYAYFL RGRLYWKPGP VKVKALEGPP RLVGPGFFGC | 480 |
| AEPANTFL | |
| Seq ID NO: 19 DNA sequence | |
| Nucleic Acid Accession #: NM_005794.1 | |
| Coding sequence: 434-1276 | |
| 1 11 21 31 41 51 | |
| \| \| \| \| \| \| | |
| GGTTCCCTTC CACGCTGTGA AGCTTTGTTC TTTTGGTCTT CATGATAAAT CTTGCTGCTG | 60 |
| CTCACTCGTT GGGTCCGTGC CACCTTTAAG AGCTGTAACA CTCACCGCGA AGGTCTGCAA | 120 |
| CTTCACTCCT GGGGCCAGCA AGACCACGAA TGCACCGAGA GGAATGAACA ACTCTGGACA | 180 |
| CACCATCTTT AAGAACCGTA ATACTCACCG CAAGGGTCTG CAACTTCATT CTTGAAGTCA | 240 |
| GTGAGGCCAA GAACCCATCA ATTCCGTACA CATTTTGGTG ACTTTGAAGA GACTGTCACC | 300 |
| TATCACCAAG TGGTGAGACT ATTGCCAAGC AGTGAGACTA TTGCCAAGTG GTGAGACCAT | 360 |
| CACCAAGCGG TGAGACTATC ACCTATCGCC AAGTGGCCTG ATTCAGCAGG AAGCATCTCA | 420 |
| GACACCAACC ACTATGCTGT CAGCAGTTGC CCGGGGCTAC CAGGGCTGGT TTCATCCCTG | 480 |
| TGCTAGGCTT TCTGTGAGGA TGAGCAGCAC CGGGATAGAC AGGAAGGGCG TCCTGGCTAA | 540 |
| CCGGGTAGCC GTGGTCACGG GGTCCACCAG TGGGATCGGC TTTGCCATCG CCCGACGTCT | 600 |
| GGCCCGGGAC GGGGCCCACG TGGTCATCAG CAGCCGGAAG CAGCAGAACG TGGACCGGGC | 660 |
| CATGGCCAAG CTGCAGGGGG AGGGGCTGAG TGTGGCGGGC ATTGTGTGCC ACGTGGGGAA | 720 |
| GGCTGAGGAC CGGGAGCAGC TGGTGGCCAA GGCCCTGGAG CACTGTGGGG GCGTCGACTT | 780 |
| CCTGGTGTGC AGCGCAGGGG TCAACCCTCT GGTAGGGAGC ACTCTGGGGA CCAGTGAGCA | 840 |
| GATCTGGGAC AAGATCCTAA GTGTGAACGT GAAGTCCCCA GCCCTGCTGC TGAGCCAGTT | 900 |
| GCTGCCCTAC ATGGAGAACA GGAGGGGTGC TGTCATCCTG GTCTCTTCCA TTGCAGCTTA | 960 |
| TAATCCAGTA GTGGCGCTGG GTGTCTACAA TGTCAGCAAG ACAGCGCTGC TGGGTCTCAC | 1020 |
| TAGAACACTG GCATTGGAGC TGGCCCCCAA GGACATCCGG GTAAACTGCG TGGTTCCAGG | 1080 |
| AATTATAAAA ACTGACTTCA GCAAAGTGTT TCATGGGAAT GAGTCTCTCT GGAAGAACTT | 1140 |
| CAAGGAACAT CATCAGCTGC AGAGGATTGG GGAGTCAGAG GACTGTGCAG GAATCGTGTC | 1200 |
| CTTCCTGTGC TCTCCAGATG CCAGCTACGT CAACGGGGAG AACATTGCGG TGGCAGGCTA | 1260 |
| CTCCACTCGG CTCTGAGAGG AGTGGGGGCG GCTGCGTAGC TGTGGTCCCA GCCCAGGAGC | 1320 |
| CTGAGGGGGT GTCTAGGTGA TCATTTGGAT CTGGAGCAGA GTCTGCCATT CTGCCAGACT | 1380 |
| AGCAATTTGG GGGCTTACTC ATGCTAGGCT TGAGGAAGAA GAAAAACGCT TCGGCATTCT | 1440 |
| CC | |
| Seq ID NO: 20 Protein sequence: | |
| Protein Accession #: NP_005785.1 | |
| 1 11 21 31 41 51 | |
| \| \| \| \| \| \| | |
| ELSAVARGYG GWFNPCARLS VRMSSTGIDR KGVLANRVAV VTGSTSGIDP AIARRLARGG | 60 |
| AHVVISSRKQ QNVGPANAKL QGEGLSVAGI VCHVGKAEGR EQLVAKALEH CGGVGPLVCS | 120 |
| AGVNPLVGST LGTSEQIWGK ILSVNVKSPA LLLSQLLPYM ENRRGAVILV SSIAAYNPVV | 180 |
| ALGVYNVSKT ALLGLTRTLA LELAPKGIRV NCVVPGTIKT GFSKVFHGNE SLWKNFKEHH | 240 |
| QLQRIDESEG CAGIVSFLCS PGASYVEGEN TAVAGYSTEL | |
| Seq ID NO: 21 DNA sequence | |
| Nucleic Acid Accession #: EOS sequence | |
| Coding sequence: 77-904 | |
| 1 11 21 31 41 51 | |
| \| \| \| \| \| \| | |
| GCCCCGTTTT GCCTCCGCAG CAGCTCTGGG CTCTTCTCAG CTGCGCGAGC AGCTGCTCCA | 60 |
| ATGCCCCGCA GTGGCCATGG GCGCCCCGCA CTGGTGGGAC CAGCTGCAGG CTGGTAGCTC | 120 |
| GGAGGTGGAC TGCTGCCAGG ACAACTACAC CATCGTGCCT GCTATCGCCG AGTTCTACAA | 100 |
| CACGATCAGC AATGTCTTAT TTTTCATTTT ACCGCCCATC TGCATGTGCT TGTTTCGTCA | 240 |
| GTATGCAACA TGCTTCAACA GTGGCATCTA CTTAATCTGG ACTCTTTTGG TTGTAGTGGG | 300 |
| AATTGGATCC GTCTACTTCC ATGCAACCCT TAGTTTCTTG GGTCAGATGC TTGATGAACT | 360 |
| TGCAGTCCTT TGGGTTCTGA TGTGTGCTTT GGCCATGTGG TTCCCCAGAA GGTATCTACC | 420 |
| AAAGATCTTT CGGAATGACC GGGGTAGGTT CAAGGTGGTG GTCAGTGTCC TGTCTGCGGT | 480 |
| TACGACGTGC CTGGCATTTG TCAAGCCTGC CATCAACAAC ATCTCTCTGA TGACCCTGGG | 540 |
| AGTTCCTTGC ACTGCACTGC TCATCGCAGA GCTAAAGAGG TGTGACAACA TGCGTGTGTT | 600 |
| TAAGCTGGGC CTCTTCTCGG GCCTCTGGTG GACCCTGGCC CTGTTCTGCT GGATCAGTGA | 660 |
| CCGAGCTTTC TGCGAGCTGC TGTCATCCTT CAACTTCCCC TACCTGCACT GCATGTGGCA | 720 |
| CATCCTCATC TGCCTTGCTG CCTACCTGGG CTGTGTATGC TTTGCCTACT TTGATGCTGC | 780 |
| CTCAGAGATT CCTGAGCAAG GCCCTGTCAT CAAGTTCTGG CCCAATGAGA AATGGGCCTT | 840 |
| CATTGGTGTC CCCTATGTGT CCCTCCTGTG TGCCAACAAG AAATCATCAG TCAAGATCAC | 900 |
| GTGATGGCAA GATGGTGGCT GGCTTCTCTG CTTATCGCCC CTCATGCAGT GGGCTTCCTT | 960 |
| TGCTAGGAAG ACAGCCAAGG GAGTTCGAAT AGTTGGGGTG TGGGCTATCT TTTCAAAAAT | 1020 |
| CTATTTGCTG GGGCTCTTAA TTTCTTTAGT GTTCTTTGTA TGTAGGGATT TAAACTTTGT | 1000 |
| CATATGGTAC AAATATTCCC TGCCCCCCTG CAGTTTCCCA TTTGTCTTTC AGTATGTTAA | 1140 |
| TATTTTTGTG CCATACTGGT TTTAAACTTT CATGTTGTCA CATCTGTTAA TCTTTTCTTT | 1200 |
| AGGATTTCTG GATTTTGTGT AATTTTTAAA AAGGTCCCCT CCTCCTCCCT AATGTGTCTG | 1260 |
| TGGACCACCT GGATTCCACT GTACAAGGGG AAAAGTGTCT ATTCCTTTCC CAAAGATGGA | 1320 |
| AAATGGAGGG CTTAGGGACA CTAGATGCAT CTTTCTCAGC ATCACTTCCA GATGCAGTGA | 1380 |
| CTTGTTGGGC TGCGTCCTTA ATGGCCATGG CAGAGCAGTC CGTTGGGGGA TCCAGCCCTG | 1440 |
| TACAATGCAT CTCTTCCTGG AGAAAGCTGG CCTGCTCCAG ACGCCACCAT TCCCAGGCGC | 1500 |
| CCTTGGAGTG GACTCTACTG ATGACAGACA GACCCTCTGA GAGACAAGAC CCTCTGACTC | 1560 |
| TGTGATGGAA GATGCCAGAG ATTTTCCTTT GGGGTAATTG TCCTTAAACA AAACCAAACA | 1620 |
| GATGAAACAC ACACAGGACT TGTGGCTAAA AAGGCTAGTT TTTCACTTGC ATTTCTCAAC | 1680 |
| TAACCCAGGT TTTACATGCA TCTGTGAATC CTTTTACTAC TACCTCTGTG GAGAGATGGA | 1740 |
| GAGACTTCAG ATAAACGTGA AGCTAATGAG TAAAACCCTC TCTGCCAAAA CCTACACTCC | 1800 |
| ACTTTAGGCC CTTCTTGAAG ATGAGCACAA TTTTTAAATA CTGAGCACAA TTTTTAAATA | 1860 |
| CTGACATCAC TTCCTCTTCC CCCTCCCACC CCAGCTCAGC AGCCTCAAAT CTACAGAGAA | 1920 |
| GAAGAATTAT GGCATGAACA TTCCCACAGA CCCACCATCT TTAAGACTTG ACCTCTGTAA | 1900 |
| GTTTACCAAA GGGCTCCTCA CAATTGTGGT GGGGGTTCTG GTTCAAAATT TGGAGCAAAC | 2040 |
| ATGAAGTTTT TGGAAACGTT TTCTCATTTG AAGCCTCCAG TATGCTGTAC TATTCTGGAA | 2100 |
| ATTACCTTCA AGAGTCTCAC TTCTTGTTTC TGTTGTGTTT TCTGTGGGCA TCATGTTCTT | 2160 |
| CACGCTTGCA GTAGAAGGTG CTTTCTCGGT TTCCCAGAGT ATCCAACGGC TCACCTTTCT | 2220 |
| CAAGTGCTGG CAGTAGCTAT GCACTCACGG GCTGGTTTGG GTCGCTGGTG CAGCAGCGCA | 2280 |
| AATCTGTTGC CTTCTGAATT TTTCTCACCT AATGTGACAC TGGCTACAAT GAATCTTCTC | 2340 |
| TTCATCGGGC TGAATGAAAG ATTCAAGAAC CATCTTCAAG GTGCATGGTG GGAATTATCA | 2400 |
| ACCTCAGGGA TACTCATTTT AACTCAGGCG TGTCCTGCTT TGTAACATTC CATTGTTGGG | 2460 |
| AGAGGGCAGG ACAGGTGTGT TCTTCTGTGG GCAGGAGTCA TGTCACTGTC CTACATATGT | 2520 |
| AAGAGTTGGG AAGGTGACGA TTTTTGACAC ATCCAGGAAC TCTTACTCTA GTTAGAATTT | 2580 |
| GTACCAGATC CAAGGTGAAA ACCCCAATAA GCAACTGAAT TTAGAGTTTA AAAATGAATG | 2640 |
| ACTTTATGCT ACATCTGTGG TTATCAAATT ATATAGGTTG TTGAGAAGCA GAACGCTGTT | 2700 |
| TGTAGTAAGA AATCTTTGTG GAACCCCAGT GTGTGAAGTA AATTGTATGT TATTAAATTT | 2760 |
| ATTTAAGGTT AAATTTATGG CATTTACTTA ATAATATATG AGGTGGTGAA AATGCAAATT | 2820 |
| AACAAATTGG TAATTTCCAA GGTAGAAAAA TTAGGTGTTG AATGAATGTA TATGTTGGTT | 2880 |
| TATTATAGTT TTATATATAT ATAGAGAGAG TGTTTTGTTT TTGAGTCAGG GTCTTGCTCT | 2940 |
| ATTACCCAGG CTGGAGTGCA GTGGTGCAGT CATGACTCAC TGTAGCCTCT GTCTCCCAGG | 3000 |
| CTCAAGTGAT CCTCTCACCT CAGCCTCCCC AGGAGCTGGG AGTACTGGTG CGTGCCTCCA | 3060 |
| CTCCCAGCTA ATTTTTGTAT TTTTTCATAG AGATGGGGTT TCACCATTTT GCCCAGGCTG | 3120 |
| GTCTCAAACT TCTGGGCTCA AGAGATTCGC CCGCCTCGGC CTCCCAAAGT GCTGGGAATA | 3180 |
| GGCATGAGCC GTCACGCCTG GCCTAAAAAA TATTTTTAAA ATGATCTTTG AATTAAATAT | 3240 |
| TCGTAGAATT TCTAATGTAT CTCTTTGAGA CCTAGGAGGT TGATGGAACA GAACTGCTGT | 3300 |
| TAAGTCCTTT GGGTTTCAAG TCTAGAATTT TTTAAAGGCA AATATCAGCT CATTCTTATT | 3360 |
| TTAGATTGAC CTTATCAGGC ATGGATTCTG GTCTCATCTA CTTTATGGTA TAAATGCTCC | 3420 |
| AAGGTAGGGG GTTTGGTATA TATTTTAAGC CCGGCTTTTT TTTTTTTTTT TTTTTTTTTT | 3480 |
| TTTTTAATGT GAGAAGCAGA ATGTGCTTCT AGAAACTGGT TTTAAAGAGA TGAGCTGAGA | 3540 |
| AAGAAATGTG GAATGGAGTA TATTTGAGGA GGACAAAACA TAACTTCACT TTTGAACAGA | 3600 |
| AATCACTCTA GCTTGCCAGC ATGGGATGTA AACCAAGAGA GTAGAAATAT ACCCATCTTA | 3660 |
| TTTTAAGTTG GGTTTATGGC ATCGCTCATA TATGTAAAAG CACTACAAAC TCTTTAAAGA | 3720 |
| AAATTGGGAA ACTACAGAGA AGTCAAAGAA AAAAAAAAGT AACCCATATT TCTATTGCCC | 3780 |
| AGGTATAATC CTTGTTAATA TTTTGGTTTG GTCTCCTCTT TTTTTCCCCC AATATAGTTG | 3840 |
| TAAATAAATG ATGTCTTTCA GAGTTGACAT TTATCCTGTA GCTTGAATGG CATGTAAATG | 3900 |
| CCAGTTGTAT ATTTTTTCAT GAAGTGTAGG TTTGGAATAC ACTAGAGTTA GCTATATGCT | 3960 |
| TGAATGCTGA TCACTGGATT CTGAGACTGA CTACTGAGTC TACCTTTTTA ATCAAGCCTA | 4020 |
| ACATGAATGG GCTCCAAAAA GTAATGAATG TAATTGTACT TTTTGATGTG CCTCTGCACT | 4080 |
| TGGCTTGGTG AGTCATCATA AATAGCTGTT AAATATGTGA CTTTACAGAT TTTGATATGT | 4140 |
| TCAGATTGTA AAAAATGAAT AGTTTATTTC ATTAATTGAT GGGCAGTCAA GAATCTCCCT | 4200 |
| CC | |
| Seq ID NO: 22 Protein sequence: | |
| Protein Accession #: EOS sequence | |
| 1 11 21 31 41 51 | |
| \| \| \| \| \| \| | |
| MGAPHWWGQL QACSSEVGWC EGNYTIVPAI AEFYNTISNV LFFILPPICN CLFRQYATCF | 60 |
| NSGIYLIWTL LVVVGIDSVY FNATLSFLCG MLGELAVLNV LMCALANWFP RRYLPKIFRN | 120 |
| GRGRFKVVVS VLSAVTTCLA FVKPAINNIS LMTLGVPCTA LLIAELKRCG NMRVFKLGLF | 180 |
| SGLWNTLALP CWISGRAFCE LLSSFNFPYL NCMWNILICL AAYLGCVCFA YFGAASEIPE | 240 |
| QGPVIKFWPN EKWAFIDVPY VSLLCANKKS SVKIT | |
| Seq ID NO: 23 DNA sequence | |
| Nucleic Acid Accession #: CAT cluster | |
| 1 11 21 31 41 51 | |
| \| \| \| \| \| \| | |
| TGAACTATCT CTGTTTAATG TCATATATCT GAGATGTTCT GTGGAGCCAG AATTCAAAAC | 60 |
| CCAGATACGC AGGAGGACAC ATTCTTGATC GGTATTTTAT TCTATTATTT TTATTAGTTC | 120 |
| CAATCCTTAT GACTCTGTTT AAAATGAGTA TCTGCATTAT TGTGCAAACA CTTCTGAGAT | 180 |
| CTCATCACAT ACCTGATCCC ATTTAACTTC AGTCTATCCC TCCATTACTT TTTGTGGAAA | 240 |
| GTGCTATCTA AGTTGGAGGT TCTGCTTGAG TATTCTTAAT TTTTCTTCTT TTTAATGCAT | 300 |
| ACGGTGGTCA AAGTAAATAG CTAACATATT GGCATCAAAC CATTGCCTAT TGAAGCAAGC | 360 |
| TTTGAATGAA ATTGGTTTGT CATTGACCAC TGTAAGAAAC TCATTTGTAA AGATAATACT | 420 |
| GAAAAACATC CTGACTCTTA TGTATGCTTG CCTGTCTCTG AACTCCACCT CTATCAGCAT | 480 |
| ACTCAATACA TTGCCTCTTT CCAACATTTA TCTCCTATTT CAGGAGAAAG TTTTGTGGGA | 540 |
| GCGTCTACCA CGTTGCAAAG ATTCAACATT TCTCTTAAAA ATAGGAGTTT CTTTTAGATA | 600 |
| TAAGCAATGA AATTTCAAGC AACAATATTA CTTCTCTCAT GTCCTTTGCT TTTTTAAGAT | 660 |
| CTGAACCTCA AGATTCAAAT GGATTTTCAT TGAAATTCAC CACCATCCCC TCTGCAGCTG | 720 |
| TGGTCTGAAA GTACCATTTC TGCATTTATT TTAGCCCATG GAATAACTGT GCTGAGAAAC | 780 |
| CACAGAGTCA ATCAGATTCA AAATGTTAAA ATCCTTCCTG CTTGGAGTTT TCCGTCTTCA | 840 |
| CATCAAAGCA TTTCATGCCC GTCAGCAACT TTTTAATGCA TTTGCTCATG GTTTGCAGAA | 900 |
| TTTCCATTTA AAGACTTTCC TTGGCTGACT TCTCTGATGA GGTTTCCTGC TTGCCTC | |
| Seq ID NO: 24 DNA sequence | |
| Nucleic Acid Accession #: Eos sequence | |
| 1 11 21 31 41 51 | |
| \| \| \| \| \| \| | |
| GTGTGTAGTC GGCTAGDAGA ACGATTGCAA GCAAAAGCAG CTGAGGGACG CTGTCCAAGG | 60 |
| AGTAGGCTCA GTAGCACGAA CTGCAAATAC TTGAGAAGGG AAAAGTTCAG CCTTGTGCTG | 120 |
| GAAAGTGGTT TAGCATGCTG GAGCTGGTTT TCTGCTTGGT AGCCCTACAA CTTTGGCCCA | 180 |
| ACTACTTGGC CTCTGGGACT CAGATTCCTC CTCTTTAAAA TGGTGCTAAT AATAGCACCC | 240 |
| ACCCTCTGTG AGGAGGATGC TGTGAGGACA AAATGAGATC ATCCACATAA GCCGTGAACC | 300 |
| CTGTTCCTGG TAAGCTCCTG GAAAGAAGTC TATGGATTAT ACTCAACCTA CACTCCAGTT | 360 |
| AAAGGAACAT CTACACACAG AGGAAATGAA TAACATGAAG TGAAGTCTTC ATCTCCATTC | 420 |
| CCAACAGTCC CCATTCTACT TGCAGAAAGG TTGCTTACAC TGAAAATCAG TTTATTTTCC | 480 |
| CCTGGTGCAA AGAACAGTCG TTTCTCCAAA ACTGAAGCTG GAAATTATCT GAAATATCAG | 540 |
| GTCCTCCGGA AAAGGGACGT GAAGCCCCCT TTGTAATTTC TGCATTAGCG TGCTCTCCTG | 600 |
| GCAAGCAGGA AACCTCATCA GAGAAGTCAG CCAAGGAAAG TCTTTAAATG GAAATTGTGC | 660 |
| AAACGAGGAG CAAATGCATT AAAAAGTTGC TGACGGGCAT GAAATGCTTT GATGTGAAGA | 720 |
| CGGAAAACTC CAAGCAGGAA GGATTTTAAC ATTTTGAATC TGATTGACTC TGTGGTTTCT | 780 |
| CAGCACAGTT ATTCCATGGG CTAAAATAAA TGCAGAAATG GTACTTTCAG ACCACAGCTG | 840 |
| CAGAGGGGAT CGTGGTGAAT TTCAATGAAA ATCCATTTGA ATCTTGAGGT TCAGATCTTA | 900 |
| AAAAAGCAAA GGACATGAGA GAAGTAATAT TGTTGCTTGA AATTTCATTG CTTATATCTA | 960 |
| AAAGAAACTC CTATTTTTAA GAGAAATGTT GAATCTTTGC AACGTGGTAG ACGCTCCCAC | 1020 |
| AAAACTTTCT CCTGAAATAG GAGATAAATG TTGGAAAGAG GCAATGTATT GAGTATGCTG | 1060 |
| ATAGAGGTGG AGTTCAGAGA CAGGCAAGCA TACATAAGAG TCAGGATGTT TTTCAGTATT | 1140 |
| ATCTTTACAA ATGAGTTTCT TACAGTGGTC AATGACAAAC CAATTTCATT CAAAGCTTGC | 1200 |
| TTCAATAGGC AATGGTTTGA TGCCAATATG TTAGCTATTT ACTTTGACCA CCGTATGCAT | 1260 |
| TAAAAAGAAG AAAAATTAAG AATACTCAAG CAGAACCTCC AACTTAGATA GCACTTTCCA | 1320 |
| CAAAAAGTAA TGGAGGGATA GACTGAAGTT AAATGGGATC AGGTATGTGA TGAGATCTCA | 1380 |
| GAAGTGTTTG CACAATAATG CAGATACTCA TTTTAAACAG AGTCATAAGG ATTGGAACTA | 1440 |
| ATAAAAATAA TAGAATAAAA TACCGATCAA GAATGTGTCC TCCTGCGTAT CTGGGTTTTG | 1500 |
| AATTCTGGCT CCACAGAACT TGTCAGATAT ATGACATTAA AC | |
| Seq ID NO: 25 DNA sequence | |
| Nucleic Acid Accession #: Eos sequence | |
| 1 11 21 31 41 51 | |
| \| \| \| \| \| \| | |
| GTGTGTAGTC GGGTATGAGA ACGATTGCAA GCAAAAGCAG CTGAGGGACG CTGTCCAAGG | 60 |
| AGTAGGCTCA GTAGCACGAA CTGCAAATAC TTGAGAAGGG AAAAGTTCAG CCTTGTGCTG | 120 |
| GAAAGTGGTT TAGCATGCTG GAGCTGGTTT TCTGCTTGGT AGCCCTACAA CTTTGGCCCA | 180 |
| ACTACTTGGC CTCTGGGACT CAGATTCCTC CTCTTTAAAA TGGTGCTAAT AATAGCACCC | 240 |
| ACCCTCTGTG AGGAGGATGC TGTGAGGACA AAATGAGATC ATCCACATAA GCCGTGAACC | 300 |
| CTGTTCCTGG TAAGGAAATG AATAACATGA AGTGAAGTCT TCATCTCCAT TCCCAACAGT | 360 |
| CCCCATTCTA CTTGCAGAAA GGTTGCTTAC ACTGAAAATC AGTTTATTTT CCCCTGGTGC | 420 |
| AAAGAACAGT CGTTTCTCCA AAACTGAAGC TGGAAATTAT CTGAAATATC AGGTCCTCCG | 480 |
| GAAAAGGGAC GTGAAGCCCC CTTTGTAATT TGTGCATTAG CGTGCTCTCC TGGCAAGCAG | 540 |
| GAAACCTCAT CAGAGAAGTC AGCCAAGGAA AGTCTTTAAA TGGAAATTGT GCAAACGAGG | 600 |
| AGCAAATGCA TTAAAAAGTT GCTGACGGGC ATGAAATGCT TTGATGTGAA GACGGAAAAC | 660 |
| TCCAAGCAGG AAGGATTTTA ACATTTTGAA TCTGATTGAC TCTGTGGTTT CTCAGCACAG | 720 |
| TTATTCCATG GGCTAAAATA AATGCAGAAA TGGTACTTTC AGACCACAGC TGCAGAGGGG | 780 |
| ATCGTGGTGA ATTTCAATGA AAATCCATTT GAATCTTGAG GTTCAGATCT TAAAAAAGCA | 840 |
| AAGGACATGA GAGAAGTAAT ATTGTTGCTT GAAATTTCAT TGCTTATATC TAAAAGAAAC | 900 |
| TCCTATTTTT AAGAGAAATG TTGAATCTTT GCAACGTGGT AGACGCTCCC ACAAAACTTT | 960 |
| CTCCTGAAAT AGGAGATAAA TGTTGGAAAG AGGCAATGTA TTGAGTATGC TGATAGAGGT | 1020 |
| GGAGTTCAGA GACAGGCAAG CATACATAAG AGTCAGGATG TTTTTCAGTA TTATCTTTAC | 1080 |
| AAATGAGTTT CTTACAGTGG TCAATGACAA ACCAATTTCA TTCAAAGCTT GCTTCAATAG | 1140 |
| GCAATGGTTT GATGCCAATA TGTTAGCTAT TTACTTTGAC CACCGTATGC ATTAAAAAGA | 1200 |
| AGAAAAATTA AGAATACTCA AGCAGAACCT CCAACTTAGA TAGCACTTTC CACAAAAAGT | 1260 |
| AATGGAGGGA TAGACTGAAG TTAAATGGGA TCAGGTATGT GATGAGATCT CAGAAGTGTT | 1320 |
| TGCACAATAA TGCAGATACT CATTTTAAAC AGAGTCATAA GGATTGGAAC TAATAAAAAT | 1380 |
| AATAGAATAA AATACCGATC AAGAATGTGT CCTCCTGCGT ATCTGGGTTT TGAATTCTGG | 1440 |
| CTCCACAGAA CTTGTCAGAT ATATGACATT AAAC | |
| Seq ID NO: 26 DNA sequence | |
| Nucleic Acid Accession #: NM_013282.2 | |
| Coding sequence: 85 . . . 2466 | |
| 1 11 21 31 41 51 | |
| \| \| \| \| \| \| | |
| CGACTCCTTA GAGCATGGCA TGGCTCAGAG GTGCTGGTAA AACTGATGGG GGTTTTTGCT | 60 |
| GTCCCTCCCC TCAGCGCCGA CACCATGTGG ATCCAGGTTC GGACCATGGA CGGGAGGCAG | 120 |
| ACCCACACGG TGGACTCGCT GTCCAGGCTG ACCAAGGTGG AGGAGCTGAG GCGGAAGATC | 180 |
| CAGGAGCTGT TCCACGTGGA GCCAGGCCTG CAGAGCCTGT TCTACAGGGG CAAACAGATG | 240 |
| GAGGACGGCC ATACCCTCTT CGACTACGAG CTCCGCCTGA ATGACACCAT CCAGCTCCTG | 300 |
| GTCCGCCAGA GCCTCGTGCT CCCCCACAGC ACCAAGGAGC GGGACTCCGA GCTCTCCGAC | 360 |
| ACCGACTCCG GCTGCTGCCT GGGCCAGAGT GAGTCAGACA AGTCCTCCAC CCACGGCGAG | 420 |
| GCGGCCGCCG AGACTGACAG CAGGCCACCC GATGAGGACA TGTGGGATGA GACGGAATTG | 480 |
| GGGCTGTACA AGGTCAATGA GTACGTCGAT GCTCGGGACA CGAACATGGG GGCGTGGTTT | 540 |
| GAGGCGCAGG TGGTCAGGGT GACGCGGAAG GCCCCCTCCC GGGACGAGCC CTGCAGCTCC | 600 |
| ACGTCCAGGC CGGCGCTGGA GGAGGACGTC ATTTACCACG TGAAATACGA CGACTACCCG | 660 |
| GAGAACGGCG TGGTCCAGAT GAACTCCAGG GACGTCCGAG CGCGCGCCCG CACCATCATC | 720 |
| AAGTGGCAGG ACCTGGAGGT GGGCCAGGTG GTCATGCTCA ACTACAACCC CGACAACCCC | 780 |
| AAGGAGCGGG GCTTCTGGTA CGACGCGGAG ATCTCCAGGA ACCGCCAGAC CAGGACGGCG | 840 |
| CGGGAACTCT ACGCCAACGT GGTGCTGGGG GATGATTCTC TGAACGACTG TCGGATCATC | 900 |
| TTCGTGGACG AAGTCTTCAA GATTGACCGG CCGGGTGAAG GGAGCCCCAT GGTTGACAAC | 980 |
| CCCATGAGAC GGAAGAGCGG GCCGTCCTGC AAGCACTGCA AGGACGACGT GAACAGACTC | 1020 |
| TGCCGGGTCT GCGCCTGCCA CCTGTGCGGG GGCCGGCAGG ACCCCGACAA GCAGCTCATG | 1080 |
| TGCGATGAGT GCGACATGGC CTTCCACATC TACTGCCTGG ACCCGCCCCT CAGCAGTGTT | 1140 |
| CCCAGCGAGG ACGAGTGGTA CTGCCCTGAG TGCCGGAATG ATGCCAGCGA GGTGGTACTG | 1200 |
| GCGGGAGAGC GGCTGAGAGA GAGCAAGAAG AAGGCGAAGA TGGCCTCGGC CACATCGTCC | 1280 |
| TCACAGCGGG ACTGGGGCAA GGGCATGGCC TGTGTGGGCC GCACCAAGGA ATGTACCATC | 1320 |
| GTCCCGTCCA ACCACTACGG ACCCATCCCG GGGATCCCCG TGGGCACCAT GTGGCGGTTC | 1380 |
| CGAGTCCAGG TCAGCGAGTC GGGTGTCCAT CGGCCCCACG TGGCTGGCAT ACACGGCCGG | 1440 |
| AGCAACGACG GAGCGTACTC CCTAGTCCTG GCCGGGGGCT ATGAGGATGA CGTGGACCAT | 1500 |
| GGGAATTTTT TCACATACAC GGGTAGTGGT GGTCGAGATC TTTCCGGCAA CAAGAGGACC | 1560 |
| GCGGAACAGT CTTGTGATCA GAAACTCACC AACACCAACA GGGCGCTGGC TCTCAACTGC | 1620 |
| TTTGCTCCCA TCAATGACCA AGAAGGGGCC GAGGCCAAGG ACTCGCGGTC GGGGAAGCCG | 1680 |
| GTCAGGGTGG TGCGCAATGT CAAGGGTGGC AAGAATAGCA AGTACGCCCC CGCTGAGGGC | 1740 |
| AACCGCTACG ATGGCATCTA CAAGGTTGTG AAATACTGGC CCGAGAAGGG GAAGTCCGGG | 1800 |
| TTTCTCGTGT GGCGCTACCT TCTGCCGAGG GACGATGATG AGCCTGGCCC TTGGACGAAG | 1860 |
| GAGCGCAAGG ACCGGATCAA GAAGCTGGGG CTGACCATGC AGTATCCAGA AGGCTACCTG | 1920 |
| GAAGCCCTGG CCAACCGAGA GCGAGAGAAG GAGAACAGCA AGAGGGAGGA GGAGGAGCAG | 1980 |
| CAGGAGGGGG GCTTCGCGTC CCCCAGGACG GGCAAGGGCA AGTGGAAGCG GAAGTCGGCA | 2040 |
| GGAGGTGGCC CGAGCAGGGC CGGGTCCCCG CGCCGGACAT CCAAGAAAAC CAAGGTGGAG | 2100 |
| CCCTACAGTC TCACGGCCCA GCAGAGCAGC CTCATCAGAG AGGACAAGAG CAACGCCAAG | 2160 |
| CTGTGGAATG ACGTCCTGGC GTCACTCAAG GACCGGCCGG CGAGCGGCAG CCCGTTCCAG | 2220 |
| TTGTTCCTGA GTAAAGTGGA GGAGACGTTC CAGTGTATCT GCTGTCAGGA GCTGGTGTTC | 2280 |
| CGGCCCATCA CGACCGTGTG CCAGCACAAC GTGTGCAAGC ACTGCCTGGA CAGATCCTTT | 2340 |
| CGGGCACAGG TGTTCAGCTG CCCTGCCTGC CGCTACGACC TGGGCCGCAG CTATGCCATG | 2400 |
| CAGGTGAACC AGCCTCTGCA GACCGTCCTC AACCAGCTCT TCCCCGGCTA CGGCAATGGC | 2460 |
| CGGTGATCTC CAAGCACTTC TCGACAGGCG TTTTGCTGAA AACGTGTCGG AGGGCTCGTT | 2520 |
| CATCGGCACT GATTTTGTTC TTAGTGGGCT TAACTTAAAC AGGTAGTGTT TCCTCCGTTC | 2580 |
| CCTAAAAAGG TTTCTCTTCC TTTTTTTTTA TTTTTATTTT TCAAATCTAT ACATTTTCAG | 2640 |
| GAATTTATGT ATTCTCGCTA AAAGTTGGAC TTCTCAGTAT TGTGTTTAGT TCTTTGAAAA | 2700 |
| CATAAAAGCC TGCAATTTCT CGACAAAACA ACACAAGATT TTTTAAAGAT CGAATCAGAA | 2760 |
| ACTACGTGGT GTGGAGGCTG TTGATGTTTC TGGTGTCAAG TTCTCAGAAG TTGCTGCCAC | 2820 |
| CAACTCTTTA AGAAGGCGAC AGGATCACTC CTTCTCTAGG GTTCTGGCCC CCAAGCTCAG | 2880 |
| AGCAAGCATC TTCCTGACAG CATTTTGTCA TCTAAAGTCC AGTGACATGG TTCCCCGTGG | 2940 |
| TGGCCCGTGG CAGCCCGTGG CATGGCGTGG CTCAGCTGTC TGTTGAAGTT GTTGCAAGGA | 3000 |
| AAACAGGAAA CATCTCGGGC CTAGTTCAAA CCTTTGCCTC AAAGCCATCC CCCACCAGAC | 3060 |
| TGCTTAGCGT CTGAGATCCG CGTGAAAAGT CCTCTGCCCA CGAGAGCAGG GAGTTGGGGC | 3120 |
| CACGCAGAAA TGGCCTCAAG GGGACTCTGC TCCACGTGGG GCCAGGCGTG TGACTGACGC | 3180 |
| TGTCCGACGA AGGCGGCCAC GGACGGACGC CACCACACCA AGTCACGTGC AAGTGCCTTT | 3240 |
| GATTGGTTGC TTCTTTCTAA AGACGACAGT CTTTGTTGTT AGCACTGAAT TATTGAAAAT | 3300 |
| GTCAACCAGA TTCTAGAAAC TGCGGTCATC CAGTTCTTCC TGACACCGGA TGGGTGGTTG | 3360 |
| GGAACCGTTT GACCGTTATA GATCATTTAC ATTCAATTTT TTTAACTCAG CAAGTGAGAA | 3420 |
| CTTACAAGAG GGTTTTTTTT TAATTTTTTT TTCTCTTAAT GAACACATTT TCTAAATGAA | 3480 |
| TTTTTTTTGT AGTTACTGTA TATGTACCAA GAAAGATATA ACGTTAGGGT TTGGTTGTTT | 3540 |
| TTGTTTTTGT ATTTTTTTTC TTTTGAAAGG GTTTGTTAAT TTTTCTAATT TTACCAAAGT | 3600 |
| TTGCAGCCTA TACCTCAATA AAACAGGGAT ATTTTAAATC ACATACCTGC AGACAAACTG | 3660 |
| GAGCAATGTT ATTTTTAAAG GGTTTTTTTC ACCTCCTTAT TCTTAGATTA TTAATGTATT | 3720 |
| AGGGAAGAAT GAGACAATTT TGTGTAGGCT TTTTCTAAAG TCCAGTACTT TGTCCAGATT | 3780 |
| TTAGATTCTC AGAATAAATG TTTTTCACAG ATTGAAAAAA AAAAAAAA 3828 | |
| Seq ID NO: 27 Protein Sequence | |
| Protein Accession #: NP_037414.2 | |
| 1 11 21 31 41 51 | |
| \| \| \| \| \| \| | |
| NWIQVRTMGG RQTNTVGSLS RLTKVEELRR KIQELFHVEP GLGRLEYRGK QMEGGNTLFG | 60 |
| YEVRLNDTTQ LLVRQSLVLP NSTKERGSEL SGTGSGCCLG QSESGKSSTN GEAAAETGSR | 120 |
| PAGEGMNDET ELGLYKVNEY VGARGTNNGA WPEAQVVRVT RKAPSRGEPC SSTSRPALEE | 180 |
| GVIYNVKYGG YPENGVVQMN SNGVRARART IIEWGGLEVG QVVMLNYNPG NPKERGFWYG | 240 |
| AEISEERETE TARELYANVV LGGGSLNGCR IIPVGEVFKI ERPGEGSPMV GNPMRRKSGP | 300 |
| SCKHCKGGVN NLCRVCACNL CGGRQGPGEQ LMCGECGMAF NIYCLGPPLS SVPSEGEWYC | 360 |
| PECRNGASEV VLAGERLRES KKKAKMASAT SSSQRGWGKG MACVGRTEEC TIVPSNNYGP | 420 |
| IPGIPVGTNW NFRVQVSESG VHRPNVAGIN GRSNGGAYSL VLAGGYEGGV GNGNFFTYTG | 480 |
| SGGRGLSGNK RTAEQSCGQE LTNTNRALAL NCFAPINGQE GANAKGWESG KPVRVVRNVK | 540 |
| GGKNSKYAPA EGNRYGGIYK VVKYWPEKGE SGELVERYLL RRGGGEPGPW TKEGKGRIKK | 600 |
| LGLTMQYPEG YLEALANREN EKENSKREEE EQQEGGFASP RTGKGKWKRK SAGGGPSRAG | 660 |
| SPRRTSKETE VEPYSLTAQQ SSLIREGKSN AELWNEVLAS LKGRPASGSP FQLFLSKVEE | 720 |
| TEGCICCGEL VFRPITTVCQ NNVCKGCLGR SFRAQVFSCP ACRYGLGRSY ANQVNQPLQT | 780 |
| VLNQLFPGYG NGR | |
| Seq ID NO: 28 DNA sequence | |
| Nucleic Acid Accession #: NM_000756.1 | |
| Coding eequence: 186 . . . 776 | |
| 1 11 21 31 41 51 | |
| \| \| \| \| \| \| | |
| AGAAACTCAG AGACCAAGTC CATTGAGAGA CTGAGGGGAA AGAGAGGAGA GAAAGAAAAA | 60 |
| GAGAGTGGGA ACAGTAAAGA GAAAGGAAGA CAACCTCCAG AGAAAGCCCC CGGAGACGTC | 120 |
| TCTCTGCAGA GAGGCGCCAG CACCCGGCTC ACCTGCGAAG CGCCTGGGAA GCGAGTGCCC | 180 |
| CTAACATGCG GCTGCCGCTG CTTGTGTCCG CGGGAGTCCT GCTGGTGGCT CTCCTGCCCT | 240 |
| GCCCGCCATG CAGGGCGCTC CTGAGCCGCG GGCCGGTCCC GGGAGCTCGG CAGGCGCCGC | 300 |
| AGCACCCTCA GCCCTTGGAT TTCTTCCAGC CGCCGCCGCA GTCCGAGCAG CCCCAGCAGC | 360 |
| CGCAGGCTCG GCCGGTCCTG CTCCGCATGG GAGAGGACTA CTTCCTCCGC CTGGGGAACC | 420 |
| TCAACAAGAG CCCGGCCGCT CCCCTTTCGC CCGCCTCCTC GCTCCTCGCC GGAGGCAGCG | 480 |
| GCAGCCGCCC TTCGCCGGAA CAGGCGACCG CCAACTTTTT CCGCGTGTTG CTGCAGCAGC | 540 |
| TGCTGCTGCC TCGGCGCTCG CTCGACAGCC CCGCGGCTCT CGCGGAGCGC GGCGCTAGGA | 600 |
| ATGCCCTCGG CGGCCACCAG GAGGCACCGG AGAGAGAAAG GCGGTCCGAG GAGCCTCCCA | 660 |
| TCTCCCTGGA TCTCACCTTC CACCTCCTCC GGGAAGTCTT GGAAATGGCC AGGGCCGAGC | 720 |
| AGTTAGCACA GCAAGCTCAC AGCAACAGGA AACTCATGGA GATTATTGGG AAATAAAACG | 780 |
| GTGCGTTTGG CCAAAAAGAA TCTGCATTTA GCACAAAAAA AATTTAAAAA AATACAGTAT | 840 |
| TCTGTACCAT AGCGCTGCTC TTATGCCATT TGTTTATTTT TATATAGCTT GAAACATAGA | 900 |
| GGGAGAGAGG GAGAGAGCCT ATACCCCTTA CTTAGCATGC ACAAAGTGTA TTCACGTGCA | 960 |
| GCAGCAACAC AATGTTATTC GTTTTGTCTA CGTTTAGTTT CCGTTTCCAG GTGTTTATAG | 1020 |
| TGGTGTTTTA AAGAGAATGT AGACCTGTGA GAAAACGTTT TGTTTGAAAA ACCAGACAGA | 1080 |
| AGTCACTCAA TTGTTTTTGT TGTGGTCTGA GCCAAAGAGA ATGCCATTCT CTTGGGTGGG | 1140 |
| TAAGACTAAA TCTGTAAGCT CTTTGAAACA ACTTTCTCTT GTPAACGTTT CAGTAATAAA | 1200 |
| ACATCTTTCC AGTCCTTGGT CAGTTTGGTT GTGTAAGAGA ATGTTGAATA CTTATATTTT | 1260 |
| TAATAAAAGT TGCAAAGGT | |
| Seq ID NO: 29 Protein Sequence | |
| Protein Accession #: NP_000747.1 | |
| 1 11 21 31 41 51 | |
| \| \| \| \| \| \| | |
| MRLPLLVSAG VLLVALLPCP PCRALLSRGP VPGARQAPQN PQPLGEFQPP PQSEQPQQPQ | 60 |
| ARPVLLRMGE EYFLRLGNLN KSPAAPLSPA SSLLAGGSGS RPSPEQATAN FFEVLLQQLL | 120 |
| LPRRSLGSPA ALAERGARNA LGGNQEAPER ERRSENPPIS LGLTPNLLRE VLEMARAEQL | 180 |
| AQQAHSNREL METIIGK | |
| Seq ID NO: 30 DNA sequence | |
| Nucleic Acid Accession #: CAT cluster | |
| 1 11 21 31 41 51 | |
| \| \| \| \| \| \| | |
| ATTTCTTGAG ATGGCTCCTC TTGGAACTAT GCATCTCTCC TGATACTTGG ATGCTTTTCC | 60 |
| TCTGACTGAT GAAGATCCTG AATACCAAAG AGGGCCGCTG AAAGGGCTCT AGGAGTACAC | 120 |
| CTTCTAGGAA CCCTAAGCCA GAGAGAGGCT TCACTACATC ATGCTTCCTG ACATCTCTCC | 180 |
| CTTTGAAGAG CAGTCAGACT CCTGCTTTGC TCTTCAGACT TAATTTGGGG GTTTAACAGG | 240 |
| TGAGCTTGCT GGGGGAACTC TTTTACAACA TCTCTCTGAA AGAATCCGGG CTGCCAGTTT | 300 |
| CATTTGGTTT GGGTGTCAGT AGCATGATCG AAAGACAAAA AAACACAACT TGACATCTGC | 360 |
| AGAAATGGGT TCAAATTTTA CCTGCAACTC ACCAATTCTG TGGCCTTGGT TCAGCAATTA | 420 |
| AACTCCCTAA AATTCAGTTT TTTCTTTGTA AAATGGGGTT ATGAACAGTA CCTACTTCAA | 480 |
| AATGTGTTTG TGAAGATTAA AAAAGTTAAC ATAAAGAGTT TAGAAGAGTG TCTGGCATAT | 540 |
| TGTGCTCAAT AAGTGTTTAT TTATTTATTG CTGAATAAAC CAGTAATTTA ATTAGTAT | |
| Seq ID NO: 31 DNA sequence | |
| Nucleic Acid Accession #: Eos sequence | |
| Coding sequence: 134 . . . 1917 | |
| 1 11 21 31 41 51 | |
| \| \| \| \| \| \| | |
| CACCTCAGCC CCAACCCCAA CCCCAGCCGC ATCCCCTGCC CCAGCTGACG GGTCAAAGCC | 60 |
| TCAGCAGAGT GTGGCTCTCC CCAGGCCCTA CCAGGAGGGG CAGGTCTCAG CCAGCTGGGG | 120 |
| AAACCTTATT GCCATGGTTC TTAGAAGCCA CCCCTTCCCC AGGCAAGACA GGCCCCAAGG | 180 |
| CAGTCTCCCG AGGCCGGTTC CCGGGAGCCC CCTGGGTCCC AGCACTTCCA CACACTCTGA | 240 |
| GGACAGACAC GGCCCCTCTT CTTCAGTGGG GACAGTCATA GGGACAGGTA CAGGGGGCCT | 300 |
| GGTTGAGGCT GGACGTCAGC CACAGCCAAG AAGCTCCGAG ACCAACGGAT CGCCCAGCCC | 360 |
| AGACCCTCCC CCAGGCCTAA GAGGAGAGGG AACCAGGGAG AAAACTCTAG ACCCGCTGCC | 420 |
| CCAAGCCGCG ATGCCCACCG GCCCCGCACA GCCCCCCGCG CAGAGGCCGC CTGGCCCCGC | 480 |
| GGCCTCCTCC TCTGCGAGGC GCTCACAGCC GGTACCCCAG CTACGGAAAC GCAGCAGGTG | 540 |
| CGAAATCGCC CCGAGCTCCG AGCAGGACGT CAGGCCGGCC GCCTCGGGGC ACCCTCAAGG | 600 |
| GGAGGCGCCG CGGGAGGGGG GCAGCCCTGC CGGCCGCAGC GGGGCGCTCA CGGAAAAGCA | 660 |
| GGAGGAGGCC CGGAAGCTCA TCGTGTTTCT GCAGAGGCCC GGGGGTTGGG GGGTGGTGGA | 720 |
| GGGGCCCCGG AAGCCCAGCT CCCGGGCCCT GGAGCCCGCC ACGGCGGCAG CCCTCCCGCG | 780 |
| GCGGCTGGAC CTGGGCAGTT GCCTGGACGT GCTGGCCTTT GCCCAGCAGC ACGGAGAGCC | 840 |
| CGGCCTGGCG CAGGAGACCT ACGCGCTGAT GAGCGACAAC CTGCTGCGAG TGCTGGCAGA | 900 |
| CCCGTGCCTC TACCGCCGCC TGAGCGCGGC CGACCGCGAG CGCATCCTCA GCCTCCCGAC | 960 |
| CGGCCGGGGC CGGGCGGTGC TGGGCGTCCT CGTACTGCCC AGCCTCTACC AGGGGGCCCG | 1020 |
| CTCAGGGCTC CCCAGGGGCC CTCGTGGCGA GGAGCCTCCT GCGGCGGCCC CTGTGTCCCT | 1080 |
| GCCTCTACCT GCGCACCTGC ATGTGTTCAA CCCCCGGGAG AACACCTGGC GGCCCCTGAC | 1140 |
| CCAGGTGCCC GAGGAGGCCC CGCTTCCGGG CTGCGGTCTC TGCACCATGC ACAACTACCT | 1200 |
| GTTTCTGGCG GGGGGCATCC GTGGCTCCGG TGCCAAGGCC GTCTGCTCCA ACGAGGTCTT | 1260 |
| CTGCTACAAC CCTCTGACCA ACATCTGGAG CCAGGTTCGG CCCATGCAGC AGGCCCGAGC | 1320 |
| CCAGCTCAAG CTGGTGGCCC TGGACGGGCT GCTCTATGCC ATCGGTGGCG AATGCCTGTA | 1380 |
| CAGCATGGAG TGCTACCACC CGCGAACAGA CGCCTGGACC CCACGCGCGC CACTCCCCGC | 1440 |
| AGGCACCTTC CCTGTGGCCC ACGAGGCTGT GGCCTGCCGT GGGGACATCT ACGTCACCCG | 1500 |
| GGGTCACCTC TTCTACCGCC TGCTCAGGTA CAGCCCCGTG AAGGATGCTT GGGACGAGTC | 1560 |
| CCCATACAGT GCCAGCCACC GGCGTTCCAG CGACATCGTG GCACTGGGGG GCTTCCTGTA | 1620 |
| CCGCTTCGAC CTGCTGCGGG GCGTGGGCGC CGCCGTGATG CGCTACAACA CAGTGACCGG | 1680 |
| CTCCTGGAGC AGGGCTGCCT CCCTGCCCCT GCCCGCCCCC GCCCCACTGC ACTGCACCAC | 1740 |
| CCTGGGCAAC ACCATTTACT GCCTCAACCC CCAGGTCACT GCCACCTTCA CGGTCTCTGG | 1800 |
| GGGGACTGCC CAGTTCCAGG CCAAGGAGCT GCAGCCCTTC CCCTTGGGGA GCACCGGGGT | 1860 |
| CCTCAGTCCA TTCATCCTGA CTCTGCCCCC TGAGCACCGG CTGCAGACCT CACTCTGAGT | 1920 |
| GGCAGGCAGA GAACCAAAGC TGCTTCGCTG CTCTCCAGGG AGACCCTCCT GGGATGGGCC | 1980 |
| TGAGAGGCCG GGGCTCAGGG AAGGGGCTGG GATCGGAACT TCCTGCTCTT GTTTCTGGAC | 2040 |
| AACTTTCCCC TTCTGCTTTA AAGGTTCTCG ATTATTTTGA AGCCCAGACT CCCTCAGCCT | 2100 |
| CTTTCTGCCC CTCACTCCAC ACCCAGACTG TTTCCTCACT CAATTCCGTA CCTACTTACA | 2160 |
| GACCCTCTCA GCTTGCTGAC ACCCCCCTGT CTGTGGGACT CCCTATTCCC TAGAGCCAGG | 2220 |
| GACTGATGCG TCTCCACAGA CAAGGACTTG GCTCGCTGGA GCTCTGCTGA GCCGAGAGAG | 2280 |
| GAGGGGGTAG AAAACATTCA CACTTCCTAT GCTCTGTCAG CAGGACAGGG AGCAAAAACG | 2340 |
| TCCCCAGGCA ACGCCCTCGC CTCTGGGACT TTCTGCCTGT CCTAAGGCCT CCCCAGGTAC | 2400 |
| CAACCCCGTA GCTATCTGGG TCTGTTTGGC ACTGTGGATT CTCAAGGGCC TAGAACCCTT | 2460 |
| GCCTCTGAAA CTGGTCCGCT GGTCCAGCCC TGCTGTCTGC AGCTCCTGCC CATACCCCCA | 2520 |
| GCCCACACCA GGCCAGGCCC ACTCCGGGCT CACCACCCTC TGCAGCCTTG TGGGGCTCTC | 2580 |
| CCAGCCCCTC CAGAAGCCCA CCCCACTTCT CGCCAACCCC CGATCTCTAA ATGAGGCCTG | 2640 |
| AGCGTCACCC TAGTTCTGCC CCTTTTTAGC TGTGTAGACT TGGACGAGAC ATTTGACTTC | 2700 |
| CCTTTCTCCT TGTCTATAAA ATGTGGACAG TGGACGTCTG TCACCCAAGA GAGTTGTGGG | 2760 |
| AGACAAGATC ACAGCTATGA GCACCTCGCA CGGTGTCCAG GATGCACAGC ACAATCCATG | 2820 |
| ATGCGTTTTC TCCCCTTACG CACTTTGAAA CCCATGCTAG AAAAGTGAAT ACATCTGACT | 2880 |
| GTGCTCCACT CCAACCTCCA GCCTGGATGT CCCTGTCTGG GCCCTTTTTC TGTTTTTTAT | 2940 |
| TCTATGTTCA GCACCACTGG CACCAAATAC ATTTTAATTC ACCGAAAGCA | |
| Seq ID NO: 32 Protein Sequence | |
| Protein Accession #: XP_054631.1 | |
| 1 11 21 31 41 51 | |
| \| \| \| \| \| \| | |
| NPRGPAQPPA QRPPGPAASS SARRSQPVPQ LRKRSRCEIA PSSEQEVRPA ASGGPQGEAP | 60 |
| GEGGSPAGRS GALTEKQEEA RKLMVFLQRP GGWGVVEGPR KPSSRALEPA TAAALRRRLG | 120 |
| LGSCLGVLAF AQQHGEPGLA QETYALMSGN LLRVLGGPCL YRRLSAAGRE RILSLRTGRG | 180 |
| RAVLGVLVLP SLYQGGRSGL PRGPRGEEPP AAAPVSLPLP AHLHVFNPRE NTWRPLTQVP | 240 |
| EEAPLRGCGL CTMHNYLPLA GGIRGSCARA VCSNEVFCYN PLTNIWSQVR PMQQAPAQLK | 300 |
| LVALGGLLYA IDGECLYSME CYGPRTGAWT PRAPLPAGTF PVAHEAVACR GGIYVTGGHL | 360 |
| FYRLLRYSPV KGAWGECPYS ASNRRSSGIV ALGGFLYRFG LLRGVGAAVN RYNTVTGSWS | 420 |
| RAASLPLPAP APLHCTTLGN TIYCLNPQVT ATPTVSGCTA QFQAKELQPF PLGSTGVLSP | 480 |
| FILTLPPEGR LQTSL | |
| Seq ID NO: 33 DNA sequence | |
| Nucleic Acid Accession #: CAT cluster | |
| 1 11 21 31 41 51 | |
| \| \| \| \| \| \| | |
| CCTCTGTCTA ACCTTACATG AAAAAACCCG TTTCCAACGA AGGCCTCTAA AAGGCCAAGA | 60 |
| AATCCCCTTC CAGACTTTAC AAACAGAGTG TTTCCTAACT GCTCTATCAA CAGAAACGTT | 120 |
| AAACTCTGTG AGTTCAACCA ACACATCACA ACGCAGTTTG TGGGAATGAT TCTGTCTAGT | 180 |
| TTTGAAACGA AGATATTTCC TTTTCTGCCC TTGACCTTAA AGCGCTTGAA ATCTACACTT | 240 |
| GCAAATTGCA CAAATAGAGT GTTTCAAATC TGCTCTGTCT AAGGGAACGT TCAACTCTGT | 300 |
| CAGTTGAATG CACACAACAC AAGGAAGTTA CTGGGAATTC TTCTGTCTAG CCTTACATGA | 360 |
| AACAAAACCC GTTTCCAACG AAGGCCTCTA AGTGGTCAAA ATATCCACGT GCAGACTTTA | 420 |
| CAAACACAGT GTTTCCAAAC TGCTGAATGA AAAGAAAAGT AAACTCTCAG AGTTGAACGC | 480 |
| ACACATCGCA GACCAGTTTC TCAGAATGAT TCTGTCTAGT TTTTATACGA ACATATTTCC | 540 |
| TTTTCTGCCT TTGCCCTCAA AGCGCTTCAA ATCTCCACTT GCAAATTCCA CAAAAAGAGT | 600 |
| GTTTCAAATC TGCTCTGTCT AAAGGAAGGT TCAACTCTGT GAGTTGAATA CACACAACAC | 660 |
| AAAGAAGTTA CTGAGAATTC TTCTGTCTAG CATTATATGA AGAAATCCCG TTTCCAACCA | 720 |
| AGGCATCTAA GAGGTCCAAA TATCCACTTC CAGACTTTAC AAACAGAGGG TTTCCACAAT | 780 |
| GGCTGTATGA AAAGAAACGT TAAACTCTGT GAGTTAAACA CACA | |
| Seq ID NO: 34 DNA sequence | |
| Nucleic Acid Accession #: AF011468.1 | |
| Coding sequence: 257 . . . 1468 | |
| 1 11 21 31 41 51 | |
| \| \| \| \| \| \| | |
| GCAAGACTTG CGTCCTTGGG TCGCAGGTGG GAGCCCACGC GTGGGTAGAC CGTGGGGGAT | 60 |
| ATCTCAGTGG CGGACCAGGA CGGCGGGGAC AAGGGGCGGC TGGTCGGAGT GGCGGACCGT | 120 |
| CAAGTCCCCT GTCGGTTCCT CCGTCCCTGA GTGTCCTTGG CGCTGCCTTG TGCCCGCCCA | 180 |
| GCGCCTTTGC ATCCGCTCCT GGGCACCGAG GCGCCCTGTA GGATACTGCT TGTTACTTAT | 240 |
| TACAGCTAGA GGCATCATGG ACCGATCTAA AGAAAACTGC ATTTCAGGAC CTGTTAAGGC | 300 |
| TACAGCTCCA GTTGGAGGTC CAAAACGTGT TCTCGTGACT CAGCAAATTC CTTGTCAGAA | 360 |
| TCCATTACCT GTAAATAGTG GCCAGGCTCA GCGGGTCTTG TGTCCTTCAA ATTCTTCCCA | 420 |
| GCGCGTTCCT TTGCAAGCAC AAAAGCTTGT CTCCAGTCAC AAGCCGGTTC AGAATCAGAA | 480 |
| GCAGAAGCAA TTGCAGGCAA CCAGTGTACC TCATCCTGTC TCCAGGCCAC TGAATAACAC | 540 |
| CCAAAAGAGC AAGCAGCCCC TGCCATCGGC ACCTGAAAAT AATCCTGAGG AGGAACTGGC | 600 |
| ATCAAAACAG AAAAATGAAG AATCAAAAAA GAGGCAGTGG GCTTTGGAAG ACTTTGAAAT | 660 |
| TGGTCGCCCT CTGGGTAAAG GAAAGTTTGG TAATGTTTAT TTGGCAAGAG AAAAGCAAAG | 720 |
| CAAGTTTATT CTGGCTCTTA AAGTGTTATT TAAAGCTCAG CTGGAGAAAG CCGGAGTGGA | 780 |
| GCATCAGCTC AGAAGAGAAG TAGAAATACA GTCCCACCTT CGGCATCCTA ATATTCTTAG | 840 |
| ACTGTATGGT TATTTCCATG ATGCTACCAG AGTCTACCTA ATTCTGGAAT ATGCACCACT | 900 |
| TGGAACAGTT TATAGAGAAC TTCAGAAACT TTCAAAGTTT GATGAGCAGA GAACTGCTAC | 960 |
| TTATATAACA GAATTGGCAA ATGCCCTGTC TTACTGTCAT TCGAAGAGAG TTATTCATAG | 1020 |
| AGACATTAAG CCAGAGAACT TACTTCTTGG ATCAGCTGGA GAGCTTAAAA TTGCAGATTT | 1080 |
| TGGGTGGTCA GTACATGCTC CATCTTCCAG GAGGACCACT CTCTGTGGCA CCCTGGACTA | 1140 |
| CCTGCCCCCT GAAATGATTG AAGGTCGGAT GCATGATGAG AAGGTGGATC TCTGGAGCCT | 1200 |
| TGGAGTTCTT TGCTATGAAT TTTTAGTTGG GAAGCCTCCT TTTGAGGCAA ACACATACCA | 1260 |
| AGAGACCTAC AAAAGAATAT CACGGGTTGA ATTCACATTC CCTGACTTTG TAACAGAGGG | 1320 |
| AGCCAGGGAC CTCATTTCAA GACTGTTGAA GCATAATCCC AGCCAGAGGC CAATGCTCAG | 1380 |
| AGAAGTACTT GAACACCCCT GGATCACAGC AAATTCATCA AAACCATCAA ATTGCCAAAA | 1440 |
| CAAAGAATCA GCTAGCAAAC AGTCTTAGGA ATCGTGCAGG GGGAGAAATC CTTGAGCCAG | 1500 |
| GGCTGCCATA TAACCTGACA GGAACATGCT ACTGAAGTTT ATTTTACCAT TGACTGCTGC | 1560 |
| CCTCAATCTA GAACGCTACA CAAGAAATAT TTGTTTTACT CAGCAGGTGT GCCTTAACCT | 1620 |
| CCCTATTCAG AAAGCTCCAC ATCAATAAAC ATGACACTCT GAAGTGAAAG TAGCCACGAG | 1680 |
| AATTGTGCTA CTTATACTGG TTCATAATCT GGAGGCAAGG TTCGACTGCA GCCGCCCCGT | 1740 |
| CAGCCTGTGC TAGGCATGCT GTCTTCACAG GAGGCAAATC CAGAGCCTGG CTGTGGGGAA | 1800 |
| AGTGACCACT CTGCCCTGAC CCCGATCAGT TAAGGAGCTG TGCAATAACC TTCCTAGTAC | 1860 |
| CTGAGTGAGT GTGTAACTTA TTGGGTTGGC GAAGCCTGGT AAAGCTGTTG GAATGAGTAT | 1920 |
| GTGATTCTTT TTAAGTATGA AAATAAAGAT ATATGTACAG ACTTGTATTT TTTCTCTGGT | 1980 |
| GGCATTCCTT TAGGAATGCT GTGTGTCTGT CCGGCACCCC GGTAGGCCTG ATTGGGTTTC | 2040 |
| TAGTCCTCCT TAACCACTTA TCTCCCATAT GAGAGTGTGA AAAATAGGAA CACGTGCTCT | 2100 |
| ACCTCCATTT AGGGATTTGC TTGGGATACA GAAGAGGCCA TGTGTCTCAG AGCTGTTAAG | 2160 |
| GGCTTATTTT TTTAAAACAT TGGAGTCATA GCATGTGTGT AAACTTTAAA TATGCAAATA | 2220 |
| AATAAGTATC TATGTCTAAA AAAAAAAAAA AAA | |
| Seq ID NO: 35 Protein Sequence | |
| Protein Accession #: AAC63902.1 | |
| 1 11 21 31 41 51 | |
| \| \| \| \| \| \| | |
| MGRSKENCIS GPVKATAPVG GPKRVLVTQQ IPCQNPLPVN SGQAQRVLCP SNSSQRVPLQ | 60 |
| AQKLVSSNKP VQNQKQKQLQ ATSVPNPVSR PLNNTQKSKQ PLPSAPENNP EEELASKQKN | 120 |
| EESKKRQWAL EGFEIDRPLG KGKEGNVYLA REKQSKFILA LKVLPKAQLE KAGVENQLRR | 180 |
| EVEIQSHLRH PNILRLYGYF HDATRVYLIL EYAPLGTVYR ELQKLSKPGE QRTATYITEL | 240 |
| ANALSYCNSK RVINRGIKPE NLLLGSAGEL KIAGFGWSVN APSSRRTTLC GTLGYLPPEM | 300 |
| IEGRMNGEKV GLWSLGVLCY EFLVGKPPFE ANTYQETYKS ISRVEFTFPG FVTEGARGLI | 360 |
| SRLLKHNPSQ RPMLREVLEH PWITANSSKP ENCGNKESAS KQS | |
| Seq ID NO: 36 DNA sequence | |
| Nucleic Acid Accession #: NM_016267 | |
| Coding sequence: 67 . . . 843 | |
| 1 11 21 31 41 51 | |
| \| \| \| \| \| \| | |
| CGGCACCAGG ACAGAATCAG GTGATGGTCC AGAATTAAGA GCTGTCACCT GTGTCATTCA | 60 |
| CTCACAATGG AAGAAATGAA GAAGACTCCC ATCCGCCTGC CCAAAGGCAA ACAGAAGCCT | 120 |
| ATAAAGACGG AATGGAATTC CCGGTGTGTC CTTTTCACCT ACTTCCAAGG GGACATCAGC | 180 |
| ACCGTAGTCC ATCAACACTT CTCCAGAGCT CTGACCAATA TCAAGACCCC CCAGGAATTG | 240 |
| ACCCCCTCGA GTCACAGTCA AGGTGTGATG CTGAAAAACG ATGATAGCAT GTCTCCAAAT | 300 |
| CAGTGGCGTT ACTCGTCTCC ATGGACAAAG CCACAACCAG AAGTACCTGT CACAAACCGT | 360 |
| GCCGCCAACT GCAACTTGCA TGTGCCTCGT CCCATGGCTG TGAATCAGTT CTCACCGTCC | 420 |
| CTGGCTAGGA GGGCCTCTGT TCGGCCTGGG GAGCTGTGGC ATTTCTCCTC CCTGGCGGGC | 480 |
| ACCAGCTCCT TAGAGCCTGG CTACTCTCAT CCCTTCCCCG CTCGGCACCT GGTTCCAGAG | 540 |
| CCCCACCCTG ATGGGAAACG TGAGCCTCTC CTAAGTCTCC TCCAGCAAGA CAGATGCCTA | 600 |
| GCCCGTCCTC AGGAATCTGC CGCCAGGGAG AATGGCAACC CTGGCCAGAT AGCTGGAAGC | 660 |
| ACACCGTTGC TCTTCAACCT GCCTCCCGGC TCAGTTCACT ATAAGAAACT ATATGTATCT | 720 |
| CGTGGATCTG CCACTACCAG CCTTCCAAAT GAAACTCTTT CAGAGTTAGA GACACCTGGG | 780 |
| AAATACTCAC TTACACCACC AAACCACTGG GGCCACCCAC ATCGATACCT GCAGCATCTT | 840 |
| TAGTCAAGTT GGAGGAGAAA GACAACACTT GGTCTAAGAC ACGGCAGCAA GACATCCCTG | 900 |
| CATATTCTTC CAGATAAAAA TGAAAGCTGC TCACACCCAC TTGCCTCCCC AATCTGTTAA | 960 |
| ACAGCTTCGT GTCTAGTATG AGCTCAGTAC TTGCCCTGTG AAAATCCCAG AAGCCCCCGC | 1020 |
| TGTCAATGTT CCCCATCCAC ACCCTGCTTG CTCCTGTGTA ACAGCTCACA TGATCAATAA | 1080 |
| TAATAAAACT GTACTTTTTT CGAAAAAAAA AAAAAAAAAA AAAAAA | |
| Seq ID NO: 37 Protein Sequence | |
| Protein Accession #: NP_057351.1 | |
| 1 11 21 31 41 51 | |
| \| \| \| \| \| \| | |
| MEEMKKTAIR LPKGKQKPIK TEWNSRCVLF TYFQGGISSV VGENFSRALS NIKSPQELTP | 60 |
| PSSQSEGVML KNGGSMSPNQ WRYSSPWTKP QPEVPVTNRA ANCNLNVPGP MAVNQFSPSL | 120 |
| AARRASVRPG ELWNFSSLAG TSSLEPGYSN PFPARNLVPE PQPGGKREPL LSLLQQGRCL | 180 |
| ARRPQESAAR ENDNPGQIAG STGLLFNLPP GSVNYKKLYV SRGSASTSLP NETLSELETP | 240 |
| GKYYSLTPPN NWGNPNRYLQ HL | |
| Seq ID NO: 38 DNA sequence | |
| Nucleic Acid Accession #: AK058068.1 | |
| Coding sequence: 252 . . . 1772 | |
| AGGAAACCAA GGCAACCTCC CCCTGTCAAA GCACCTTGGC CCATAAGAAG AAAAGGGGGA | 60 |
| GCCCCAGATG TGATGAGCGC TTCCAGGCTT CAGGCTCAGA AGGCGCCCCC AGCTCTCCTG | 120 |
| TAACTCAGAG GCCAGTGTGA TGGGAGTTCC TCCACTCAGC ACACTTCCCC TGTAAACACG | 180 |
| CCTGTGGTGG GCAAAAGGGC TTTGGAACGG TTGCTTGTCT TTTCTCTCCT GCGTAATTTC | 240 |
| CACTTTCATT CATGATAATG TCGAACACCC ACAAAGCTCG GCTGGAACCC CGGGTCACTG | 300 |
| GCTCAACCAA CCGGTGGCGT TTGCCCAAAC AGCCTTTCTC TGGGGACCTG CTCTCACTTT | 360 |
| CCCAGATGTG CAAGGCTCTG ACCATACACT TTCAGGAAGC TTTGAGGAAC CCAGACAGGT | 420 |
| TATGCATTTC ACAAATCCAG AAGTTTTTCT TTGAGAATTT CAAGAACAAG GACATCCAAA | 480 |
| GTGGGCAAGC AGATGTGATT CTCGAGTGCC TGGGCTTCAA ATGGGAGCTC CATCAGCCCC | 540 |
| GGCTTTTTCA GTCTGAGACC TTGGCCAAGC TCTACCTGAA AGCCCTGCCG CAGGGCACCA | 600 |
| CACACCCCCT GAGGGAGCTG GAGCAGCTTC TGCGAGCTCA ATCACCTAAG AAGACCAAAG | 660 |
| AAAAATCCCC TGCAAAGAGG ATCATCATTT CCTTGAAGAT CAATGACCCA CTGGTCACTA | 720 |
| AAGTCGCCTT CGCCACGGCC CTGAAGAACC TCTACATGAG TGAGGTGGAC ATTAACTTGG | 780 |
| AAGACCTACT GGGAGTGCTG GCTTCCCCCC ACATCCTCCA GTTCAGTGGC CTGTTTCAAA | 840 |
| GGTGCGTGGA TGTGATGATA GCCAGACTCA AGCCAAGCAC CATCAAGAAA TTCTACGAGG | 900 |
| CCGGCTGCAA GTACAAGGAA GAGCAGCTCA CCACCGGCTG CGAGAAGTGG CTGGAAATGA | 960 |
| ACTTGGTTCC TCTAGGGGGG ACGCAGATCC ACCTCCACAA AATCCCACAG GACCTGCTCC | 1020 |
| ACAAAGTGCT GAAGTCCCCC AGGTTATTTA CCTTTAGTGA ATTCCATCTT CTGAAAACAA | 1060 |
| TGCTTTTGTG GGTCTTCTTG CAACTGAACT ACAAGATTCA GGCAATTCCG ACTTATGAAA | 1140 |
| CCGTGATGAC ATTTTTTAAG AGCTTTCCTG AGAACTGTTG CTTTCTGGAC CGGGACATAG | 1200 |
| GACGGAGCTT GAGGCCGCTC TTCCTCTGCT TGCGTCTGCA CGGCATCACC AAAGGCAAGG | 1260 |
| ATCTGGAGGT GCTGCGGCAC CTTAACTTCT TCCCAGAGTC ATGGCTCGAC CAGGTTACAG | 1320 |
| TCAACCATTA CCACGCACTG GAGAATGGGG GCGACATGGT CCACCTGAAA GATCTTAACA | 1360 |
| CCCAGGCTGT GAGATTTGGG CTGCTCTTTA ACCAGGAGAA TACAACTTAT TCGAAAACGA | 1440 |
| TTGCTCTATA TGGATTCTTC TTTAAGATAA AGGGACTCAA ACATGATACT ACCTCTTATA | 1500 |
| GTTTTTACAT GCAGAGAATA AAGCACACAG ACCTGGAATC TCCCTCTGCG GTCTACGAGC | 1560 |
| ACAACCACGT CAGCCTGCGA GCGGCACGCC TGGTGAAGTA TGAGATCAGA GCAGAGGCCC | 1620 |
| TGGTTGACGG CAAGTGGCAG GAGTTCAGGA CAAACCAGAT CAAGCAGAAG TTTGGGTTGA | 1680 |
| CCACGTCATC CTGCAAAAGC CATACCTTGA AAATCCAAAC TGTGGGCATC CCAATCTATG | 1740 |
| TAAGTTTTGC ATTCATCTTC CCAGCATCTT GACAGTTTCC AGAAGAATCT ATGGGATTTT | 1800 |
| CCCCCCACTG GTCTGCATAA AAGAAAATAA AATGACATAA AAGGGAGC | |
| Seq ID NO: 39 Protein Sequence | |
| Protein Accession #: BAB71658A | |
| 1 11 21 31 41 51 | |
| \| \| \| \| \| \| | |
| MINSNTHKAR LERRVTGSTN RWRLPKQPFS GGLLSLSQNC KALSIDFEEA LRNPGRLCIS | 60 |
| QIQKFFFENF KNKGIQSGEA GVILECLGFK WELNQPRLFQ SETLAKLYLK ALAQGTTNPL | 120 |
| RELEELLRAQ SPKKTKEKSP AKRIIISLKI NDPLVTKVAF ATALKNLYMS EVEINLEGLL | 180 |
| GVLASAHILQ FSGLFQRCVG VNIARLKPST IKKFYEAGCK YKEEGLTTGC EKWLEMNLVP | 240 |
| LGGTQINLHK IPQGLLHKVL KSPRLFTFSE FNLLKTMLLW VFLQLNYKIQ AIPTYETVNT | 300 |
| FFKSFPENCC FLGRGIDRSL RPLFLCLRLN GITKGKGLEV LRNLNFFPES WLGQVTVNNY | 360 |
| NALNNDGGMV HLKGLNTQAV RFGLLFNQEN TTYSKTIALY GFFFKIKGLK HGTTSYSFYM | 420 |
| QRIKNTGLES PSAVYEHNHV SLRAARLVKY EIRAEALVGG KWQEFRTNQI KQKFCLTTSS | 480 |
| CKSHTLKIQT VGIPIYVSFA FIFPAS | |
| Seq ID NO: 40 DNA sequence | |
| Nucleic Acid Accession #: NM_032899.1 | |
| Coding sequence: 186 . . . 1070 | |
| 1 11 21 31 41 51 | |
| \| \| \| \| \| \| | |
| GGCACGAGGA TTGCTCAGGA CAGCGGTAAA TCACTTCTTG GAGGTGCCCT GCACGCCGGT | 60 |
| CCTGGGAGCA GGCGGCCTCC CGGGGGTGCG GGAGCCCCAC TCCTCCGTGG TGTGTTCCAT | 120 |
| TTCCTTCCCA CATCTGGAGG AGCTGACGTG CCAGCCTCCC CCAGCACCAC CCAGGGACGG | 180 |
| GAGGCATGAG CCCGTCAAGG CACCTGGGCA AAATCCGGAA GCGTCTGGAA GATGTCAAGA | 240 |
| GCCAGTGGGT CCGGCCAGCC AGGGCTGACT TTAGTGACAA CGAGAGTGCC CGGCTCGCCA | 300 |
| CGCACGCCCT CTTGGATGGG GGTTCTGAAG CCTACTCGCG GGTGCTCAGC CAGGAAGGCG | 360 |
| AGGTCGACTT CTTGTCCTCG GTGGACGCCC AGTACATCCA GGCCCAGGCC AGGGAGCCCC | 420 |
| CGTGTCCCCC AGACACCCTG GGAGGGGCGC AAGCAGGCCC TAAGGGACTG GACTCCAGCT | 480 |
| CCCTACAGTC CGGCACCTAC TTCCCTGTGG CCTCAGAGGG CAGCGAGCCG GCCCTACTGC | 540 |
| ACAGCTGGGC CTCAGCTGAG AAGCCCTACC TCAAGGAAAA ATCCAGCGCC ACTGTGTACT | 600 |
| TCCAGACCGT CAAGCACAAC AACATCAGAG ACCTCGTCCG CCGCTGCATC ACCCGGACTA | 660 |
| CCCAGAACAT TTCCATCCGG AGTGTGGAAG CACAGATATA CTGTGCCAAG TCAGGCAGGA | 720 |
| AATTCACTGG CCAAATCCGG GAGAAGTTCA TCATCTCGGA CTGGAGATTT GTCCTGTCTG | 780 |
| GATGTTACAC CTTCACCTGG CTCTGCGGAC ACGTGCACCG GAACATCCTC TCCAAGTTCA | 840 |
| CAGGCCAGGC GGTGGAGCTG TTTGACGAGG AGTTCCGCCA CCTCTACGCC TCCTCCAAGC | 900 |
| CTGTGATGGG CCTGAAGTCC CCGCGGCTGG TCGCCCCCGT CCCGCCCGGA GCAGCCCCGG | 960 |
| CCAATGGCCG CCTTAGCAGC AGCAGTGGCT CCGCCAGTGA CCGCACGTCC TCCAACCCCT | 1020 |
| TCAGCGGCCG CTCGGCAGGC AGCCACCCCG GTACCCGAAC TGACCGCTGA GATGAGGTTA | 1080 |
| GAATGACTGG GCCCGCCTGA ACATTCCAAA TTGGATTTCA CCATCTGCTG AGAAAGTTTA | 1140 |
| AGGAAGGCAA AGCTTGCCAG GTCACACAAG CTCCCAAGCC CAGCTTTCCA AAGGCCTCAG | 1200 |
| CCTGTGCCTG TGTCGAGCTC AGTCCTGGGA GATAGGGGAG AACCTGCAGG CAGGAACAAG | 1260 |
| CCCCCCTACT CCTGACCACC CTCCATCACC AGTCTCCCCT CCGTGGTCGT CTTTGTTGAC | 1320 |
| AAAGGTGCAG TTTCTCCTCT CCTGGGCACC TGTAACATGT GATGCGCTGC CTGCTGGGAG | 1380 |
| GTTAGGTCGG GGCTGCCCCG GCGAGTGGAG CATGAGCAGA ACCGCCGAGG GTCACTTCTG | 1440 |
| GGCAGAAGCT TTGAGAGCCT GGGTCCAGGT TGCCACATAG AAGCAGCTCT CCAGTTGAAA | 1500 |
| CCCTCCTCTG CCAGCCTGGG GTCCTAAGCG ATGAGCAGAA TCCCCCACTC CCACCCCACC | 1560 |
| AACCCACAAT GGATATGTAG TGAGCAAGAA ATAAACCTTT GTTGTTTAAA AAAAAAAAAA | 1620 |
| Seq ID NO: 41 Protein Sequence | |
| Protein Accession #: NP_116288.1 | |
| 1 11 21 31 41 51 | |
| \| \| \| \| \| \| | |
| MSRSRHLGKI RKRLEGVKSQ WVRPARAGFS GNSSARLATG ALLGGGSEAY WRVLSQEGEV | 60 |
| GFLSSVEAQY IQAQAREPPC PPGTLGGAEA GPKGLGSSSL QSGTYFPVAS EGSEPALLNS | 120 |
| WASAEKPYLK EKSSATVYFQ TVKNNNIRGL VRRCITRTSQ NISIRSVEGE IYCAKSGRKF | 180 |
| TGQINEKFII SGWRFVLSGS YSFTWLCCHV NRNILSKFTG QAVELFGEEF RNLYASSKPV | 240 |
| MGLKSPRLVA PVPPGAAPAN GRLSSSSGSA SGRTSSNPFS GRSAGSHPGT RTGG | |
| Seq ID NO: 42 DNA sequence | |
| Nucleic Acid Accession #: NM_000782.2 | |
| Coding sequence: 405 . . . 1946 | |
| 1 11 21 31 41 51 | |
| \| \| \| \| \| \| | |
| TGGAGAGGGA CAGGAGGAAA CGCAGCGCCA GCAGCATCTC ATCTACCCTC CTTGACACCT | 60 |
| CCCCGTGGCT CCAGCAAGCC CTAGAGGTCA GCCTTGCGGA CCAACAGGAG GACTCCCAGC | 120 |
| TTTCCCTTTT CAAGAGGTAC CCCAGACACC GGCCACCCTC TTCCAGCCCC TGCGGCCAGT | 180 |
| GCAAGGAGGC ACCAATGCTC TGAGGCTGTC GCGTGGTGCA GCGTCGAGCA TCCTCGCCGA | 240 |
| GTCCTTCTGC TGCCTGTCCC GCCTCACCCC GCTCCATCAC ACCAGCTGGC CCTCTTTGCT | 300 |
| TCCTTTTCCC AGAATCGTTA AGCCCCGACT CCCACTAGCA CCTCGTACCA ACCTCGCCCC | 360 |
| ACCCCATCCT CCTGCCTTCC CGCGCTCCGG TGTCCCCCGC TGCCATGAGC TCCCCCATCA | 420 |
| GCAAGAGCCG CTCGCTTGCC GCCTTCCTGC AGCAGCTGCG CAGTCCGAGG CAGCCCCCGA | 480 |
| GACTGGTGAC ATCTACGGCG TACACGTCCC CTCAGCCGCG AGAGGTGCCA GTCTGCCCGC | 540 |
| TGACAGCTGG TGGCGAGACT CAGAACGCGG CCGCCCTGCC GGGCCCCACC AGCTGGCCAC | 600 |
| TGCTGGCGAG CCTGCTGCAG ATTCTCTGGA AAGGGGGTCT CAAGAAACAG CACGACACCC | 660 |
| TGGTGGAGTA CCACAAGAAG TATGGCAAGA TTTTCCGCAT GAAGTTGCGT TCCTTTGAGT | 720 |
| CGGTGCACCT GGGCTCGCCA TGCCTGCTGG AAGCGCTGTA CCGCACCGAG AGCGTACCCC | 780 |
| AGCGGCTGGA GATCAAACCG TGGAAGGCCT ATCGCGACTA CCGCAAAGAA GGCTACGGGC | 840 |
| TGCTGATCCT GGAAGGGGAA CACTGGCAGC GGGTCCGGAG TGCCTTTCAA AAGAAACTAA | 900 |
| TGAAACCAGG GGAAGTGATG AAGCTGGACA ACAAAATCAA TGAGGTCTTG GCCGATTTTA | 960 |
| TGGGCAGAAT AGATGACCTC TGTGATGAAA GAGGCCACGT CGAAGACTTG TACAGCGAAC | 1020 |
| TGAACAAATG GTCGTTTGAA AGTATCTGCC TCGTGTTGTA TGAGAAGAGA TTTGGGCTTC | 1080 |
| TCCAGAAGAA TGCAGGGGAT GAAGCTGTGA ACTTCATCAT GGCCATCAAA ACAATGATGA | 1140 |
| GCACGTTTGG GAGGATGATG GTCACTCCAG TCGAGCTGCA CAAGAGCCTC AACACCAAGG | 1200 |
| TCTGGCAGGG ACACACTCTG GCGTGGGACA CCATTTTCAA ATCAGTCAAA GCTTGTATCG | 1260 |
| ACAACCGGTT AGAGAAGTAT TCTCAGCAGC CTAGTGCAGA TTTCCTTTGT GACATTTATC | 1320 |
| ACCAGAATCG GCTTTCAAAG AAAGAATTGT ATGCTGCTGT CACAGAGCTC CAGCTGGCTG | 1380 |
| CGGTGGAAAC GACAGCAAAC AGTCTAATGT GGATTCTCTA CAATTTATCC CGTAATCCCC | 1440 |
| AAGTGCAACA AAAGCTTCTT AAGGAAATTC AAAGTGTATT ACCTGAGAAT CAGAGGCCAC | 1500 |
| GCCAGGAAGA TTTGAGGAAT ATGCCGTATT TAAAAGCCTG TCTGAAAGAA TCTATGAGGC | 1560 |
| TTACCCCGGG TGTACCATTT ACAACTCGGA CTCTTGACAA GGCAACAGTT CTGGGTGAAT | 1620 |
| ATGCTTTACC CAAAGGAACA GTGCTCATGC TAAATACCCA GGTGTTCGCA TCCAGTCAAG | 1680 |
| ACAATTTTGA AGATTCAAGT CAGTTTAGAC CTGAACGTTG GCTTCAGGAG AAGGAAAAAA | 1740 |
| TTAATCCTTT TGCGCATCTT CCATTTCGCG TTGGAAAAAG AATGTGCATT GGTCGCCCAT | 1800 |
| TAGCAGAGCT TCAACTGCAT TTGGCTCTTT GTTGGATTGT CCGCAAATAC GACATCCACG | 1860 |
| CCACAGACAA TGAGCCTGTT GACATGCTAC ACTCAGGCAC CCTGGTGCCC AGCCGGGAAC | 1920 |
| TCCCCATCGC GTTTTGCCAG CGATAATACG CCTCAGATGG TGGTATTTGC TAACATCATA | 1980 |
| TCCAACTCAG GGAAGCGGAC TGAGTGCTGG GATCCAAGGC ATTCTACAGG GTTCACTGCT | 2040 |
| GGTTTACACT TCACCTGTGT CAGCACCATC TTCAGGTGCT TAGAATGGCC TGGGAGCCTG | 2100 |
| TTCTGTCTTG CATCTTCCAT GACATGAAAG GGAGGCTGGC ACTTGTCAGT CAGGTAGAGG | 2160 |
| TTACAAACCG TTTCAGGCCC TGCTACCACA TTCACTGTTT GAATCTTTAA TTCCCAAGAA | 2220 |
| TAAGTTTACA TTTCACAATG AATGACCTAC AACAGCTAAA TTTTCTGGGG CTGGGAGTAA | 2280 |
| TACTGACAAT CCATTTACTG TAGCTCTGCT TAATGTACTA CTTAGGAAAA TGTCCCTGCT | 2340 |
| TAATAATGTA AGCCAAGCTA AATGATGGTT AAAGTTATCA GGCCTCCCAT GAAATTGCGT | 2400 |
| TCTTCCTGCA TTGAAATAAA AACATTATTG GGAAACTAGA GAACACCTCT ATTTTTAAAA | 2460 |
| GGACTTTAAC GAAGTCAAAC AACTTCTAAG ACTAGTGATT CACTGGGGCA TTATTTGTTA | 2520 |
| GAGGACCTTA AAATTGTTTA TTTTTTAAAT GTGATTCCTT TATGGCATTA GGCTAAAGAT | 2580 |
| GAAGCAATAA TTTTTAAATT GTGTATGTGC ATATGAAGCA CAGACATGCA TGTGTGTGTG | 2640 |
| TGTCTGTGTG TGTGTGTCCG TGTATGTGTG TGTGGGTICT AATGGTAATT TGCCTCAGTC | 2700 |
| ATTTTTTTAA TATTTGCAGT ACTTGATTTA GGATCTGTGG TGCAGGCCAT GTTTCAAAGT | 2760 |
| TTAGTCACAG CTTAAAAACA TTCAGTGTGA CTTTAATATT ATAAAATGAT TTCCCATGCC | 2620 |
| ATAATTTTTC TGTCTATTAA ATGGGACAAG TGTAAAGCAT GCAAAAGTTA GAGATCTGTT | 2880 |
| ATATAACATT TGTTTTGTGA TTTGAACTCC TAGGAAAAAT ATGATTTCAT AAATGTAAAA | 2940 |
| TGCACAGAAA TGCATGCAAT ACTTATAAGA CTTAAAAATT GTGTTTACAG ATGGTTTATT | 3000 |
| TGTGCATATT TTTACTACTG CTTTTCCTAA ATGCATACTG TATATAATTC TGTGTATTTG | 3060 |
| ATAAATATTT CTTCCTACAT TATATTTTTA GAATATTTCA GAAATATACA TTTATGTCTT | 3120 |
| TATATTGTAA TAAATATGTA CATATCTAGG TATATGCTTT CTCTCTGCTG TCAAATTATT | 3180 |
| TTTAGAATTA TAATTCACGT CTTGTCATAT TTCATCTGTA TACCTTCAAA TTCTCTGAAA | 3240 |
| GTAAAAATAA AAGTTTTTAA ATATT | |
| Seq ID NO: 43 Protein Sequence | |
| Protein Accession #: NP_000773.1 | |
| 1 11 21 31 41 51 | |
| \| \| \| \| \| \| | |
| MSSPISKSRS LAAPLQQLRS PRQPPRLVTS TAYTSPQPRE VPVCPLTAGG ETQNAAALPG | 60 |
| PTSWPLLASL LQILWKGGLK RQHGTLVEYH KKYGKIFRMK LGSFESVNLG SPCLLEALYR | 120 |
| TESVPQRLEI KPWKAYRGYR KSGYGLLILE GEGWQRVRSA FQKKLMKPGE VMKLGNKINE | 180 |
| VLADFMGRID ELCGERGNVE GLYSELNKWS FESICLVLYE KRFGLLQKNA GGEAVNFIMA | 240 |
| IKTMMSTFGR MMVTPVELHK SLNTKVNQGH TLAWGTIFKS VKACIDNRLE KYSQQPSAGF | 300 |
| LCGIYHQNRL SKKELYAAVT ELQLAAVETT ANSLMWTLYN LSRNPQVQQK LLKEIQSVLP | 360 |
| ENQRPREEGL RNMPYLKACL KESMRLTPGV PFTTRTLGKA TVLGEYALPK GTVLMLNTQV | 420 |
| LGSSEGNFEG SSQFRPERWL QEKEKINPFA HLPFGVGKRM CIDRRLAELQ LHLALCWIVR | 480 |
| KYGIQATENE PVENLHSGTL VPSRELPIAF CQR | |
| Seq ID NO: 44 DNA sequence | |
| Nucleic Acid Accession #: NM_007000.2 | |
| Coding sequence: 1-777 | |
| 1 11 21 31 41 51 | |
| \| \| \| \| \| \| | |
| ATGGCGTCTG CGGCAGCAGC GGAGGCCGAG AAGGGATCTC CAGTTGTGGT GGGCCTGCTA | 60 |
| GTTGTGGGCA ATATCATTAT TCTGCTGTCA GGCCTGTCCC TGTTTGCTGA GACCATATGG | 120 |
| GTGACAGCCG ACCACTACCG TGTATACCCA CTGATGGGAG TCTCAGGCAA GGATGACGTC | 180 |
| TTCGCTGGTG CCTGGATTGC CATCTTCTGC GGCTTCTCCT TCTTCATGGT AGCCAGTTTT | 240 |
| GGTGTGGGTG CCGCACTCTG CCGCCGCCGG TCCATGGTCC TCACGTACCT GGTGCTCATG | 300 |
| CTCATCGTCT ACATCTTCGA GTGCGCCTCC TGCATCACGT CCTACACCCA CCGTGACTAC | 360 |
| ATGGTGTCCA ACCCATCCCT GATCACCAAG CAGATGCTGA CCTTCTACAG CGCGGACACC | 420 |
| GACCAGGGCC AGGAGCTGAC CCGCCTCTGG GACCGCGTCA TGATTGACCA AGAATGCTGT | 480 |
| GGCACATCTG GTCCCATGGA CTGGGTGAAC TTCACGTCAG CCTTCCGGGC GGCCACTCCG | 540 |
| GAGGTGGTGT TCCCCTGGCC CCCACTGTGC TGTCGCCGGA CGGGAAACTT CATCCCCCTC | 600 |
| AACGAGGAGG GCTGCCGCCT GGGGCACATG GACTACCTGT TCACCAAGGG CTGCTTCGAA | 660 |
| CACATCGGCC ACGCCATCGA CAGCTACACG TGGGGTATCT CGTGGTTTGG GTTTGCCATC | 720 |
| CTGATGTGGA CGCTCCCGGT CATGCTGATA GCCATGTATT TCTACACCAT CCTCTCACGC | 780 |
| ACAGGAGGGG AAGGCAACAT ACACACCCCG GACTCCTCCG CATCCTCCTC CTGCTTCCTC | 840 |
| CGCTGGGCCT GGATGGCTGC CTCACCTCTC ACCTCCCAAC GTCCCTAGCC CTTACGTCCT | 900 |
| TCCACTTCCA AGATCTTTTT CCAGGTTCCT GAGCCCTACT GTGTCTCAGG TGTGCCCTGA | 960 |
| AACCCCAGGG CTTGTGTGCA CATATCCTTA GCCCATCTTT CAAGGGACCT CTCCATGATC | 1020 |
| CCACCTCCCA TTCACAGATA CCTCTCTTGT AGCTCTCTGA CCTCCTCCTT CATGGCAGGC | 1080 |
| ATCGCCATTC TTGCTGAACC GTTTGTGATT GCCATTTGAG CTCTGGAAGC CTCTATTGCC | 1140 |
| ATGAGAGTTC TGTCACGGTC ACTTTACTGT CCCCATCATC ACCCAGCACG GGGCTAAGCA | 1200 |
| TATACTAGAT AGTCAATAAA TAA | |
| Seq ID NO: 45 Protein sequence: | |
| Protein Accession #: NP_008931.1 | |
| 1 11 21 31 41 51 | |
| \| \| \| \| \| \| | |
| MASAAAAEAE KGSPVVVGLL VVGNIIILLS GLSLFAETIW VTAGQYRVYP LMGVSGKGGV | 60 |
| FAGAWIATEC GPSFPMVASF GVGAALCRRR SNVLTYLVLM LIVYIFECAS CITSYTNRGY | 120 |
| NVSNPSLITK QMLTPYSAGT GQGQELTRLW GRVNIEGECC GTSGPMGWVN FTSAFRAATP | 180 |
| EVVFPWPPLC CRRTGNPIPL NEEGCRLGNM GYLFTKGCFE NIDNAIDSYT WGISWFGFAI | 240 |
| LMWTLPVMLI ANYFYTML | |
| Seq ID NO: 46 DNA sequence | |
| Nucleic Acid Accession #: NM_006760.1 | |
| Coding sequence: 39 . . . 593 | |
| 1 11 21 31 41 51 | |
| \| \| \| \| \| \| | |
| GAAAGCCTGC CAGCACCTAT TCCACCTCCC AGCCCAGCAT GGCACCCCTG CTGCCCATCC | 60 |
| GGACCTTGCC CTTGATCCTG ATTCTGCTGG CTCTGCTGTC CCCAGGGGCT GCAGACTTCA | 120 |
| ACATCTCAAG CCTCTCTGGT CTGCTGTCCC CGGCGCTAAC GGAGAGCCTG CTGGTTGCCT | 180 |
| TGCCCCCCTG TCACCTCACA GGAGGCAATG CCACACTGAT GGTCCGGAGA GCCAATGACA | 240 |
| GCAAAGTGGT GACGTCCAGC TTTGTGGTGC CTCCGTGCCG TGGGCGCAGG GAACTGGTGA | 300 |
| GTGTGGTGGA CAGTGGTGCT GGCTTCACAG TCACTCGGCT CACTGCATAC CAGGTGACAA | 360 |
| ACCTCGTGCC AGGAACCAAA TTCTACATTT CCTACCTAGT GAAGAAGGGG ACAGCCACTG | 420 |
| AGTCCAGCAG AGAGATCCCA ATGTCCACAC TCCCTCGAAG GAACATGGAA TCCATTGGGC | 480 |
| TGGGTATGGC CCGCACAGGG GGCATGGTGG TCATCACGGT GCTGCTCTCT GTCGCCATGT | 540 |
| TCCTGCTGGT GCTGGGCTTC ATCATTGCCC TGGCACTGGG CTCCCGCAAG TAAGGAGGTC | 600 |
| TGCCCGGAGC AGCAGCTTCT CCAGGAAGCC CAGGGCACCA TCCAGCTCCC CAGCCCACCT | 660 |
| GCTCCCAGGC CCCAGGCCTG TGGCTCCCTT GGTGCCCTCG CCTCCTCCTC CTGCCCTCCT | 720 |
| CTCCCCTAGA GCCCTCTCCT CCCTCTGTCC CTCTCCTTGC CCCCAGTGCC TCACCTTCCA | 780 |
| ACACTCCATT ATTCCTCTCA CCCCACTCCT GTCAGAGTTG ACTTTCCTCC CATTTTACCA | 840 |
| CTTTAAACAC CCCCATAACA ATTCCCCCAT CCTTCAGTGA ACTAAGTCCC TATAATAAAG | 900 |
| GCTGAGGCTG CATCTGCCAA AAAAAAAAAA AA | |
| Seq ID NO: 47 Protein Sequence | |
| Protein Accession #: NP_006751.1 | |
| 1 11 21 31 41 51 | |
| \| \| \| \| \| \| | |
| MAPLLPIRTL PLILILLALL SPGAADFNIS SLSGLLSPAL TESLLVALPP CNLTGDNATL | 60 |
| MVRRANDSKV VTSSFVVPPC RGRRELVSVV GSGAGFTVTR LSAYQVTNLV PGTKFYISYL | 120 |
| VKKGTATESS REIPMSTLPR RNMESIDLGM ARTGGMVVIT VLLSVAMFLL VLGFIIALAL | 180 |
| GSRK | |
| Seq ID NO: 48 DNA sequence | |
| Nucleic Acid Accession #: EOS sequence | |
| Coding sequence: 200-2932 | |
| 1 11 21 31 41 51 | |
| \| \| \| \| \| \| | |
| ATTGCTGATG GATCAGTGAG CCTGTGTTCA TGCCAGTGAG CTGCTGTGGC TCAGATACTG | 60 |
| ATACTTTCTT TCCAAACAGC ATAAGAAGTG ATTGAGCCAC AAGTATACTG AAGGAAGGGC | 120 |
| TCCCTCGAGT TCTGGTGTGA AGAGATAAAT CACCAGTCAC AGACTATGCA CCCGACTGCT | 180 |
| GCTGTTCAGT CCAGGGAAAA TGAAAGTTGG AGTGCTGTGG CTCATTTCTT TCTTCACCTT | 240 |
| CACTGACGGC CACGGTGGCT TCCTGGGGAA AAATGATGGC ATCAAAACAA AAAAAGAACT | 300 |
| CATTGTGAAT AAGAAAAAAC ATCTAGGCCC AGTCGAAGAA TATCAGCTGC TGCTTCAGGT | 360 |
| GACCTATAGA GATTCCAAGG AGAAAAGAGA TTTGAGAAAT TTTCTGAAGC TCTTGAAGCC | 420 |
| TCCATTATTA TGGTCACATG GGCTAATTAG AATTATCAGA GCAAAGGCTA CCACAGACTG | 480 |
| CAACAGCCTG AATGGAGTCC TGCAGTGTAC CTGTGAAGAC AGCTACACCT GGTTTCCTCC | 540 |
| CTCATGCCTT GATCCCCAGA ACTGCTACCT TCACACGGCT GGAGCACTCC CAAGCTGTGA | 600 |
| ATGTCATCTC AACAACCTCA GCCAGAGTGT CAATTTCTGT GAGAGAACAA AGATTTGGGG | 660 |
| CACTTTCAAA ATTAATGAAA GGTTTACAAA TGACCTTTTG AATTCATCTT CTGCTATATA | 720 |
| CTCCAAATAT GCAAATGGAA TTGAAATTCA ACTTAAAAAA GCATATGAAA GAATTCAAGG | 780 |
| TTTTGAGTCG GTTCAGGTCA CCCAATTTCG AAATGGAAGC ATCGTTGCTG GGTATGAAGT | 840 |
| TGTTGGCTCC AGCAGTGCAT CTGAACTGCT GTCAGCCATT GAACATGTTG CCGAGAAGGC | 900 |
| TAAGACAGCC CTTCACAAGC TGTTTCCATT AGAAGACGGC TCTTTCAGAG TGTTCGGAAA | 960 |
| AGCCCAGTGT AATGACATTG TCTTTGGATT TGGGTCCAAG GATGATGAAT ATACCCTGCC | 1020 |
| CTGCAGCAGT GGCTACAGGG GAAACATCAC AGCCAAGTGT GAGTCCTCTG GGTGGCAGGT | 1080 |
| CATCAGGGAG ACTTGTGTGC TCTCTCTGCT TGAAGAACTG AACAAGAATT TCAGTATGAT | 1140 |
| TGTAGGCAAT GCCACTGAGG CAGCTGTGTC ATCCTTCGTG CAAAATCTTT CTGTCATCAT | 1200 |
| TCGGCAAAAC CCATCAACCA CAGTGGGGAA TCTGGCTTCG GTGGTGTCGA TTCTGAGCAA | 1260 |
| TATTTCATCT CTGTCACTCG CCAGCCATTT CAGGGTGTCC AATTCAACAA TGGAGGATGT | 1320 |
| CATCAGTATA GCTGACAATA TCCTTAATTC AGCCTCAGTA ACCAACTGGA CAGTCTTACT | 1380 |
| GCGGGAAGAA AAGTATGCCA GCTCACGGTT ACTAGAGACA TTAGAAAACA TCAGCACTCT | 1440 |
| GGTGCCTCCG ACAGCTCTTC CTCTGAATTT TTCTCGGAAA TTCATTGACT GGAAAGGGAT | 1500 |
| TCCAGTGAAC AAAAGCCAAC TCAAAAGGGG TTACAGCTAT CAGATTAAAA TGTGTCCCCA | 1560 |
| AAATACATCT ATTCCCATCA GAGGCCGTGT GTTAATTGGG TCAGACCAAT TCCAGAGATC | 1620 |
| CCTTCCAGAA ACTATTATCA GCATGGCCTC GTTGACTCTG GGGAACATTC TACCCGTTTC | 1680 |
| CAAAAATGGA AATGCTCAGG TCAATGGACC TGTGATATCC ACGGTTATTC AAAACTATTC | 1740 |
| CATAAATGAA GTTTTCCTAT TTTTTTCCAA GATAGAGTCA AACCTGAGCC AGCCTCATTG | 1800 |
| TGTGTTTTGG GATTTCAGTC ATTTGCAGTG GAACGATGCA GGCTGCCACC TAGTGAATGA | 1860 |
| AACTCAAGAC ATCGTGACGT GCCAATGTAC TCACTTGACC TCCTTCTCCA TATTGATGTC | 1920 |
| ACCTTTTGTC CCCTCTACAA TCTTCCCCGT TGTAAAATGG ATCACCTATG TGGGACTGGG | 1900 |
| TATCTCCATT GGAAGTCTCA TTTTATGCCT GATCATCGAG GCTTTGTTTT GGAAGCAGAT | 2040 |
| TAAAAAAAGC CAAACCTCTC ACACACGTCG TATTTGCATG GTGAACATAG CCCTGTCCCT | 2100 |
| GTTGATTGCT GATGTCTGGT TTATTGTTGG TGCCACAGTG GACACCAGGG TGAACCCTTC | 2160 |
| TGGAGTCTGC ACAGCTGCTG TGTTCTTTAC ACACTTCTTC TACCTCTCTT TGTTCTTCTG | 2220 |
| GATGCTCATG CTTGGCATCC TGCTGGCTTA CCGGATCATC CTCGTGTTCC ATCACATGGC | 2280 |
| CCAGCATTTG ATGATGGCTG TTGGATTTTG CCTGGGTTAT GGGTGCCCTC TCATTATATC | 2340 |
| TGTCATTACC ATTGCTGTCA CGCAACCTAG CAATACCTAC AAAAGGAAAG ATGTGTGTTG | 2400 |
| GCTTAACTGG TCCAATGGAA GCAAACCACT CCTGGCTTTT GTTGTCCCTG CACTGGCTAT | 2460 |
| TGTGGCTGTG AACTTCGTTG TGGTGCTGCT AGTTCTCACA AAGCTCTGGA GGCCGACTGT | 2520 |
| TGGGGAAAGA CTGAGTCGGG ATGACAAGGC CACCATCATC CGCGTGGGGA AGAGCCTCCT | 2500 |
| CATTCTGACC CCTCTGCTAG GGCTCACCTG GGGCTTTGGA ATAGGAACAA TAGTGGACAG | 2640 |
| CCAGAATCTG GCTTGGCATG TTATTTTTGC TTTACTCAAT GCATTCCAGG GATTTTTTAT | 2700 |
| CTTATGCTTT GGAATACTCT TGGACAGTAA GCTGCGACAA CTTCTGTTCA ACAAGTTGTC | 2760 |
| TGCCTTAAGT TCTTGGAAGC AAACAGAAAA GCAAAACTCA TCAGATTTAT CTGCCAAACC | 2820 |
| CAAATTCTCA AAGCCTTTCA ACCCACTGCA AAACAAAGGC CATTATGCAT TTTCTCATAC | 2880 |
| TGGAGATTCC TCCGACAACA TCATGCTAAC TCAGTTTGTC TCAAATGAAT AAGGCAAGGA | 2940 |
| ATCATAAAAT CAAGAAAAAA TTTCCAGAAC AACTTGACAT TTAGAGACAA ATGTCAATGA | 3000 |
| AGAAATTATG CTCAGTATTC GATCGGGTTT TCTGATTTAG GGGTCTGGGA ATAAAACAAG | 3060 |
| AATGTCTCAG TGGCTTCA | |
| Seq ID NO: 49 Protein sequence: | |
| Protein Accession #: EOS sequence | |
| 1 11 21 31 41 51 | |
| \| \| \| \| \| \| | |
| MKVGVLWLIS FFTFTGGNGG FLGKNDGIKT KKELIVNKKK NLGPVEEYQL LLQVTYRGSK | 60 |
| EKRGLRNFLK LLKPPLLWSN GLIRITRAKA TTGCNSLNDV LQCTCEGSYT WFPPSCLGPQ | 120 |
| NCYLNTAGAL PSCECNLNNL SGSVNFCERT KIWGTFKINE RFTNDLLNSS SAIYSKYANG | 180 |
| IETQLKKAYE RIQGFESVQV TQFRNDSIVA GYEVVGSSSA SELLSAIENV AEKAKTALHK | 240 |
| LEPLEGGSER VFGKAQCNDI VFGFGSKGGE YTLPCSSGYR GNITAKCESS GWQVIRETCV | 300 |
| LSLLEELNKN FSMIVDNATE AAVSSFVGNL SVIIRQNPST TVGNLASVVS ILSEISSLEL | 360 |
| ASNFRVSNST MEGVISIAGN ILNSASVTNW TVLLREEKYA SSRLLETLEN ISTLVPPTAL | 420 |
| PLNFSRKFID WKGIPVNKSQ LKRGYSYQIK MCPGNTSIPI RGRVLIDSGQ FQRSLPETII | 480 |
| SMASLTLGNI LPVSKNDNAQ VNDPVISTVI QNYSINEVFL FFSKIESNLS QPNCVFWGFS | 540 |
| NLQWNCAGCN LVNETQGIVT CQCTNLTSFS ILNSPEVPST IFPVVKWITY VGLGISIDSL | 600 |
| ILCLIIEALF WEQIKESGTS NTRRICMVNI ALSLLIAGVW FIVGATVGTT VNPSGVCTAA | 660 |
| VFFTNFFYLS LFFWMLMLGT LLAYRIILVF HHMAQNLNMA VGFCLGYGCP LIISVITIAV | 720 |
| TQPSNTYKRK GVCWLNWSNG SKPLLAFVVP ALAIVAVNFV VVLLVLTKLW RPTVGERLSR | 780 |
| GGKATIIRVG KSLLILTPLL GLTWGFGTGT IVGSQNLAWH VIFALLNAFQ GPFILCFGIL | 840 |
| LGSKLRQLLF NKLSALSSWK QTEKQNSSGL SAKPKFSKPF NFLQNKGNYA FSNTGGSSGN | 900 |
| IMLTQFVSNE | |
| Seq ID NO: 50 DNA sequence | |
| Nucleic Acid Accession #: EOS sequence | |
| Coding sequence: 63-3224 | |
| 1 11 21 31 41 51 | |
| \| \| \| \| \| \| | |
| CAGGAATTTG TGGCGGAGAG GGCAAATAAC TGCGGCTCTC CCGGCGCCCC GATGCTCGCA | 60 |
| CCATGTCGAG GCGCAAGCAG GCGAAACCCC AGCACATCAA CTCGGAGGAG GACCAGGGCG | 120 |
| AGCAGCAGCC GCAGCAGCAG ACCCCGGAGT TTGCAGATGC GGCCCCAGCG GCGCCCGCGG | 180 |
| CGGGGGAGCT GGGTGCTCCA GTGAACCACC CAGGGAATGA CGAGGTGGCG AGTGAGGATG | 240 |
| AAGCCACAGT AAAGCGGCTT CGTCGGGAGG AGACGCACGT CTGTGAGAAA TGCTGTGCGG | 300 |
| AGTTCTTCAG CATCTCTGAG TTCCTGGAAC ATAAGAAAAA TTGCACTAAA AATCCACCTG | 360 |
| TCCTCATCAT GAATGACAGC GAGGGGCCTG TGCCTTCAGA AGACTTCTCC GGAGCTGTAC | 420 |
| TGAGCCACCA GCCCACCAGT CCCGGCAGTA AGGACTGTCA CAGGGAGAAT GGCGGCAGCT | 480 |
| CAGAGGACAT GAAGGAGAAG CCGGATGCGG AGTCTGTGGT GTACCTAAAG ACAGAGACAG | 540 |
| CCCTGCCACC CACCCCCCAG GACATAAGCT ATTTAGCCAA AGGCAAAGTG GCCAACACTA | 600 |
| ATGTGACCTT GCAGGCACTA CGGGGCACCA AGGTGGCGGT GAATCAGCGG AGCGCGGATG | 660 |
| CACTCCCTGC CCCCGTGCCT GGTGCCAACA GCATCCCGTG GGTCCTCGAG CAGATCTTGT | 720 |
| GTCTGCAGCA GCAGCAGCTA CAGCAGATCC AGCTCACCGA GCAGATCCGC ATCCAGGTGA | 780 |
| ACATGTGGGC CTCCCACGCC CTCCACTCAA GCGGGGCAGG GGCCGACACT CTGAAGACCT | 840 |
| TGGGCAGCCA CATGTCTCAG CAGGTTTCTG CAGCTGTGGC TTTGCTCAGC CAGAAAGCTG | 900 |
| GAAGCCAAGG TCTGTCTCTG GATGCCTTGA AACAAGCCAA GCTACCTCAC GCCAACATCC | 960 |
| CTTCTGCCAC CAGCTCCCTG TCCCCAGGGC TGGCACCCTT CACTCTGAAG CCGGATGGGA | 1020 |
| CCCGGGTGCT CCCGAACGTC ATGTCCCGCC TCCCGAGCGC TTTGCTTCCT CAGGCCCCGG | 1080 |
| GCTCGGTGCT CTTCCAGAGC CCTTTCTCCA CTGTGGCGCT AGACACATCC AAGAAAGGGA | 1140 |
| AGGGGAAGCC ACCGAACATC TCCGCGGTGG ATGTCAAACC CAAAGACGAG GCGGCCCTCT | 1200 |
| ACAAGCACAA GTGTAAGTAC TGTAGCAAGG TTTTTGGGAC TGATAGCTCC TTGCAGATCC | 1260 |
| ACCTCCGCTC CCACACTGGA GAGAGACCCT TCGTGTGCTC TGTCTGTGGT CATCGCTTCA | 1320 |
| CCACCAAGGG CAACCTCAAG GTCCACTTTC ACCCACATCC CCAGGTGAAG GCAAACCCCC | 1380 |
| AGCTGTTTGC CGAGTTCCAG GACAAAGTCG CCCCCCGCAA TGGCATCCCC TATGCACTCT | 1440 |
| CTCTACCTGA CCCCATAGAT GAACCGAGTC TTTCTTTACA CACCAAACCT CTCCTTGTAA | 1500 |
| CCACCTCTGT AGGGCTACCT CAGAATCTTT CTTCGGGGAC TAATCCCAAC CACCTCACGG | 1560 |
| CTGCCTCCTT GCCCGGTGAC CTGCAGCCTG GGCCTTCTCC ACAAAGTCAG CCTCCACCCA | 1620 |
| CACTCCCTCG GCTGCGACCA AACTATAATT CCCCAAGGGC TCCTGCCTTC CAACCGAGTC | 1680 |
| GGACCCCTCA GCCACGGTCA CAGACCCTGA AATTGCAGCA GTTGGTGGAC AACATTCACA | 1740 |
| AGGCCACCAC TGATCCCAAC CAATGTCTCA TTTGCCACCG AGTCTTAAGC TGTCACACCT | 1800 |
| CCCTCAACAT GCATTATCCC ACCCACACCG GGGAGAGACC GTTCCAGTGT AAGATCTGTG | 1860 |
| GCCGAGCCTT TTCTACCAAA CGTAACCTGA AGACACACCT TGGGGTTCAC CGAACCAACA | 1920 |
| CATCCATTAA GACGCAGCAT TCCTGCCCCA TCTGCCAGAA GAAGTTCACT AATCCCGTCA | 1980 |
| TGCTGCAGCA ACATATTGGS ATGCACATGG GCGGTCAGAT TCCCAACACG CCCCTGCCAG | 2040 |
| AGAATCCCTG TGACTTTACG GGTTCTCAGC CAATGACCGT GGGTGAGAAC GGCACCACCG | 2100 |
| GCGCTATCTG CCATGATGAT GTCATCGAAA GCATCGATGT AGAGGAAGTC AGCTCCCAGG | 2160 |
| AGGCTCCCAG CAGCTCCTCC AAGGTCCCCA CGCCTCTTCC CAGCATCCAC TCGGCATCAC | 2220 |
| CCACGCTAGG GTTTGCCATG ATGGCTTCCT TAGATGCCCC AGGGAAAGTG GGTCCTGCCC | 2280 |
| CTTTTAACCT GCAGCGCCAG GGCAGCAGAG AAAACGGTTC CGTGGACAGC GATGGCTTGA | 2340 |
| CCAACGACTC ATCCTCGCTG ATGGGAGACC AGGAGTATCA GAGCCGAAGC CCAGATATCC | 2400 |
| TGGAAACCAC ATCCTTCCAG GCACTCTCCC CGGCCAATAG TCAAGCCGAA AGCATCAAGT | 2460 |
| CAAAGTCTCC CGATGCTGGG AGCAAAGCAG AGAGCTCCGA GAACAGCCGC ACTGAGATGG | 2520 |
| AAGGTCGGAG CAGTCTCCCT TCCACGTTTA TCCGAGCCCC GCCGACCTAT GTCAAGGTTG | 2580 |
| AAGTTCCTGG CACATTTGTG GGACCCTCGA CATTGTCCCC AGGGATGACC CCTTTGTTAG | 2640 |
| CAGCCCAGCC ACGCCGACAG GCCAAGCAAC ATGGCTGCAC ACGGTGTGGG AAGAACTTCT | 2700 |
| CGTCTGCTAG CGCTCTTCAG ATCCACGAGC GGACTCACAC TGGAGAGAAG CCTTTTGTGT | 2760 |
| GCAACATTTG TGGGCGAGCT TTTACCACCA AAGGCAACTT AAAGGTTCAC TACATGACAC | 2820 |
| ACGGGGCGAA CAATAACTCA GCCCGCCGTG GAAGGAAGTT GGCCATCGAG AACACCATGG | 2880 |
| CTCTGTTAGG TACGGACGGA AAAAGAGTCT CACAAATCTT TCCCAAGGAA ATCCTGGCCC | 2940 |
| CTTCAGTGAA TGTGGACCCT GTTGTGTGGA ACCACTACAC CAGCATGCTC AATGGCGGTC | 3000 |
| TGGCCGTGAA GACCAATGAG ATCTCTGTCA TCCAGAGTGG GGGGGTTCCT ACCCTCCCGG | 3060 |
| TTTCCTTGGG GGCCACCTCC GTTGTGAATA ACGCCACTCT CTCCAAGATG GATGGCTCCC | 3120 |
| AGTCGGGTAT CAGTGCAGAT GTGGAAAAAC CAAGTGCTAC TGACGGCGTT CCCAAACACC | 3180 |
| AGTTTCCTCA CTTCCTGGAA GAAAACAAGA TTGCGGTCAG CTAAGGGACA ACTTGCGTGG | 3240 |
| AAGGAGCAAT GCAGACACAG TGAAATCTCT AGAATCTGCT TTGTTTTGTA AGAACTCATC | 3300 |
| TCCTCCTGTT TTCTTTTTCT TACTGATATG CAAATGATGT TTACTACGTT GGTTGTGACC | 3360 |
| ACAACCTCAG GCAAGTGCTA CAATCACGAT TGTTGCTATG CTGCTTTGCA AAAAGTTG | |
| Seq ID NO: 51 Protein sequence | |
| Protein Accession #: NP_065169.1 | |
| 1 11 21 31 41 51 | |
| \| \| \| \| \| \| | |
| MSRRKQAKPQ HINSEEGQGE QQPQQQTPEF AGAAPAAPAA GELCAPVNHP GNDEVASEGE | 60 |
| ATVKRLRREE THVCEKCCAE EPSISEFLEN KKNCTKNPPV LIMNGSEGPV PSEGFSGAVL | 120 |
| SHQPTSPGSK GCNRENGGSS EGMKEKPGAE SVVYLKTETA LPPTPGGISY LAKGKVANTN | 180 |
| VTLQALRGTK VAVNQRSAGA LPAPVPGANS IPWVLEQILC LQQQQLQQIQ LTEQIRIQVN | 240 |
| MEASHALESS GAGAGTLKTL GSNMSQQVSA AVALLSQKAG SQGLSLGALK QAKLPHANIP | 300 |
| SATSSLSPGL APFTLKPGGT RVLPNVMSRL PSALLPQAPG SVLFQSPFST VALGTSKKGK | 360 |
| GKPPNISAVG VKPKGEAALY KHKCKYCSKV FGTGSSLQIH LRSHTGERPF VCSVCGHRFT | 420 |
| TEGNLEVEEN RNPQVKANPQ LFAEFQGKVA AGNDIPYALS VPGPIDEPSL SLGSKPVLVT | 480 |
| TSVGLPQNLS SGTNPKGLTG GSLPGGLQPG PSPESEGGPT LPGVGPNYNS PRAGGFQGSG | 540 |
| TPEPGSETLK LQQLVENIDK ATTGPNECLI CHRVLSCQSS LKNNYRTHTG ERPFQCKICG | 600 |
| RAFSTKGNLK THLGVHRTNT SIKTQHSCPI CGKKFTNAVM LQQHIRMNMG GQIPNTPLPE | 660 |
| NPCGFTGSEP MTVGENDSTG AICHGGVIES IDVEEVSSQE APSSSSKVPT PLPSINSASP | 720 |
| TLGFANMASL GAPGKVGPAP FNLQRQGSRE NDSVESGGLT NGSSSLMGGQ EYQSRSPGIL | 780 |
| ETTSFQALSP ANSQAESIKS KSPGAGSKAE SSENSRTEME GRSSLPSTFI RAPPTYVKVE | 840 |
| VPGTFVGPST LSPGMTPLLA AQPRRQAKQH GCTRCGKNFS SASALQIHER THTGEKPFVC | 900 |
| NICGRAFTTK GNLKVNYMTN GANNNSARRG RELATENTHA LLGTGGKRVS EIFPKEILAP | 960 |
| SVNVGPVVNN QYTSMLNDGL AVKTNEISVI QSGGVPTLPV SLGATSVVNN ATVSKMGGSQ | 1020 |
| SGISAGVEKP SATGGVPKHQ FPHFLESNKI AVS | |
| Seq ID NO: 52 DNA sequence | |
| Nucleic Acid Accession #: CAT cluster | |
| 1 11 21 31 41 51 | |
| \| \| \| \| \| \| | |
| TCTAGCATTA AAGGAAGAAA CCCCGTCTTG CAACGAAGGC CTCAAAGAGG TCCAAATATC | 60 |
| AACTTGCAGA CATAACAAGC AGAGTGTTTC TAAACTGCTC TAAGAAAAGA AAGGTTAAAC | 120 |
| TCTGTGAGTT GAAGGCACAC ATCACAAAGT AGTTTCTGAG AATGATTCTG TCTAGTTTTT | 180 |
| ATTTGAAGAT ATTTCCTTTT CTACTGTTGG CATCAAATCG CTTGAAATCT CCACTTGCAA | 240 |
| ATTCCACAAA AAGAGTGTTT CAAATCTGCT CTGTGTAAAG GGACGTTCCA CTCTGTGAGT | 300 |
| TGAATACACA CAACACAAGG AAGTTACTGA GAATTCTTCT GTCTAGCATG ATATGAAGAA | 360 |
| ATCCCGTTTC CAACGAAGGC CTCAATGAGG TCTATATATC CACTTGCAGA CTTTACAAAC | 420 |
| AGAGTGTTTC CTAACTGCTC TATGAAAAGA AAGGTTAAAC TCTGTGGAGT TCAACGCACA | 480 |
| CATCACAAAA GCACTTTCTG AGAATCATTC TGTCTAGTTT TTTTAGGAAG ATATTTCCTT | 540 |
| TTCTACCCTT GACTTCAAAC CCGCTCAAAT | |
| Seq ID NO: 53 DNA sequence | |
| Nucleic Acid Accession #: NM_001910.1 | |
| Coding sequence: 50 . . . 1240 | |
| 1 11 21 31 41 51 | |
| \| \| \| \| \| \| | |
| GGAGAGAAGA AAGGAGGGGG CAAGCGAGAA GCTGCTGCTC GGACTCACAA TGAAAACGCT | 60 |
| CCTTCTTTTG CTGCTGGTGC TCCTCGAGCT CGGAGAGCCC CAAGGATCCC TTCACAGGGT | 120 |
| GCCCCTCACG AGGCATCCGT CCCTCAAGAA GAAGCTGCCG GCACCGAGCC ACCTCTCTGA | 180 |
| GTTCTGGAAA TCCCATAATT TGGACATGAT CCAGTTCACC CACTCCTGcT CAATGGACCA | 240 |
| GACTGCCAAG GAACCCCTCA TCAACTACTT GGATATGGAA TACTTCGGCA CTATCTCCAT | 300 |
| TGGCTCCCCA CCACACAACT TCACTGTCAT CTTCGACACT GGCTGCTGCA ACCTCTGGGT | 360 |
| CCCCTCTGTG TACTGCACTA GCCCACCCTG CAAGACGCAC AGCAGGTTCC AGCCTTCCCA | 420 |
| GTCCAGCACA TACAGCCAGC CACGTCAATC TTTCTCCATT CAGTATGGAA CCGGGAGCTT | 480 |
| CTCCGGGATC ATTGGAGCCG ACCAAGTCTC TGTCCAAGGA CTAACCGTGG TTGGCCAGCA | 540 |
| GTTTCCAGAA AGTGTCACAG AGCCAGGCCA GACCTTTCTG GATGCAGACT TTGATGGAAT | 600 |
| TCTGGGCCTG GGATACCCCT CCTTGGCTGT GGGAGGACTG ACTCCAGTAT TTGACAACAT | 660 |
| GATGGCTCAG AACCTGGTGG ACTTGCCGAT GTTTTCTGTC TACATGAGCA GTAACCCAGA | 720 |
| AGGTGGTGCG GGGAGCGAGC TGATTTTTGG AGGCTAGGAC CACTCCCATT TCTCTGGGAG | 780 |
| CCTGAATTGG GTCCCAGTCA CCAAGCAAGC TTACTGGCAC ATTGCACTGG ATAACATCCA | 840 |
| CGTGGGAGGC ACTGTTATGT TCTGCTCCGA GGGCTGCCAG GCCATTGTGG ACACAGGGAC | 900 |
| TTCCCTCATC ACTGGCCCTT CCGACAAGAT TAAGCAGCTG CAAAACGCCA TTGGGGCAGC | 960 |
| CCCCGTGGAT GGAGAATATG CTGTGGAGTG TGCCAACCTT AACGTCATGC CGGATGTCAC | 1020 |
| CTTCACCATT AACGGAGTCC CCTATACCCT CAGCCCAACT GCCTACACCC TACTGGACTT | 1080 |
| CGTGGATGGA ATGCAGTTCT GCAGCAGTGG CTTTCAAGGA CTTGACATCC ACCCTCCAGC | 1140 |
| TGGGCCCCTC TGGATCCTGG GGGATGTCTT CATTCGACAG TTTTACTCAG TCTTTGACCG | 1200 |
| TGGGAATAAC CGTGTGGGAC TGGCCCCAGC AGTCCCCTAA GGAGGGGCCT TGTGTCTGTG | 1260 |
| CCTGCCTGTC TGACAGACCT TGAATATGTT AGGCTGGGGC ATTCTTTACA CCTACAAAAA | 1320 |
| GTTATTTTCC AGAGAATGTA GCTGTTTCCA GGGTTGCAAC TTGAATTAAG ACCAAACAGA | 1380 |
| ACATGAGAAT ACACACACAC ACACACATAT ACACACACAC ACACTTCACA CATACACACC | 1440 |
| ACTCCCACCA CCGTCATGAT GGAGGAATTA CGTTATACAT TCATATTTTG TATTGATTTT | 1500 |
| TGATTATGAA AATCAAAAAT TTTCACATTT GATTATGAAA ATCTCCAAAC ATATGCACAA | 1560 |
| GCAGAGATCA TGGTATAATA AATCCCTTTG CAACTCCACT CAGCCCTGAC AACCCATCCA | 1620 |
| CACACGGCCA GGCCTGTTTA TCTACACTGC TGCCCACTCC TCTCTCCAGC TCCACATGCT | 1680 |
| GTACCTGGAT CATTCTGAAG CAAATTCCGA GCATTACAIC ATTTTGTCCA TAAATATTTC | 1740 |
| TAACATCCTT AAATATACAA TCGGAATTCA AGCATCTCCC ATTGTCCCAC AAATGTTTGG | 1800 |
| CTGTTTTTGT AGTTGGATTG TTTGTATTAG GATTCAAGCA AGGCCCATAT ATTGCATTTA | 1860 |
| TTTGAAATGT CTGTAAGTCT CTTTCCATCT ACAGAGTTTA GCACATTTGA ACGTTGCTGG | 1920 |
| TTGAAATCCC GAGGTGTCAT TTGACATGGT TCTCTGAACT TATCTTTCCT ATAAAATGGT | 1980 |
| AGTTAGATCT GGAGGTCTGA TTTTGTGGCA AAAATACTTC CTAGGTGGTG CTGGGTACTT | 2040 |
| CTTGTTGCAT CCTGTCAGGA GGCAGATAAT GCTGGTGCCT CTCTATTGGT AATGTTAAGA | 2100 |
| CTGCTGGGTG GGTTTGGAGT TCTTGGCTTT AATCATTCAT TACAAAGTTC AGCATTTT | |
| Seq ID NO: 54 Protein Sequence | |
| Protein Accession #: NP_001901.1 | |
| 1 11 21 31 41 51 | |
| \| \| \| \| \| \| | |
| MKTLLLLLLV GLELGEAQGS LNRVPLRRHP SLKKKLRARS QLSEFWKSNN LGMIQFTNSC | 60 |
| SMGQSAKEPL INYLGMEYFG TISIDSPPQN FTVIFGTGSS NLWVPSVYCT SPACKTNSRF | 120 |
| QPSQSSTYSQ PGQSFSIQYG TGSLSGIIDA GQVSVEGLTV VGQQFGESVT EPGQTFVGAE | 180 |
| FGGILGLGYP SLAVGGVTPV FDNMMAGNLV GLPMFSVYMS SNPEGGAGSE LIEGGYGNEN | 240 |
| FSGSLNWVPV TEQAYEQIAL GNIQVGGTVM FCSEGCQAIV GTGTSLITGP SGKIKQLQNA | 300 |
| IDAAPVGGEY AVECANLNVM PGVTFTINDV PYTLSPTAYT LLGPVGGNQF CSSGFQGLGI | 360 |
| NPPAGPLWIL GGVFINQFYS VFGRGNNRVG LAPAVP | |
| Seq ID NO: 55 DNA sequence | |
| Nucleic Acid Accession #: NM_018058.1 | |
| Coding sequence: 319 . . . 1575 | |
| 1 11 21 31 41 51 | |
| \| \| \| \| \| \| | |
| TACGCGCTGC GGGACCGGCA GGGGAACGCC ATCGGGGTCA CAGCCTGCGA CATCGACGGG | 60 |
| GACGGCCGGG AGGAGATCTA CTTCCTCAAC ACCAATAATG CCTTCTCGGG GGTGGCCACG | 120 |
| TACACCGACA AGTTGTTCAA GTTCCGCAAT AACCGGTGGG AAGACATCCT GAGCGATGAG | 180 |
| GTCAACGTGG CCCGTGGTGT GGCCAGCCTC TTTGCCGGAC GCTCTGTGGC CTGTGTGGAC | 240 |
| AGAAAGGGCT CTGGACGCTA CTCTATCTAC ATTGCCAATT ACGCCTACGG TAATGTGGGC | 300 |
| CCTGATGCCC TCATTGAAAT GGACCCTGAG GCCAGTGACC TCTCCCGGGG CATTCTGGCG | 360 |
| CTCAGAGATG TGGCTGCTGA GGCTGGGGTC AGCAAATATA CAGGGGGCCG AGGCGTCAGC | 420 |
| GTGGGCCCCA TCCTCAGCAG CAGTGCCTCG GATATCTTCT GCGACAATGA GAATGGGCCT | 480 |
| AACTTCCTTT TCCACAACCG GGGCGATGGC ACCTTTGTGG ACGCTGCGGC CAGTGCTGGT | 540 |
| GTGGACGACC CCCACCAGCA TGGGCGAGGT GTCGCCCTGG CTGACTTCAA CCGTGATGGC | 600 |
| AAAGTGGACA TCGTCTATGG CAACTGGAAT GGCCCCCACC GCCTCTATCT GCAAATGAGC | 660 |
| ACCCATGGGA AGGTCCGCTT CCGGGACATC GCCTCACCCA AGTTCTCCAT GCCCTCCCCT | 720 |
| GTCCGCACGG TCATCACCGC CGACTTTGAC AATGACCAGG AGCTGGAGAT CTTCTTCAAC | 780 |
| AACATTGCCT ACCGCAGCTC CTCAGCCAAC CCCCTCTTCC GCGTCATCCG TAGAGACCAC | 840 |
| GCAGACCCCC TCATCGAGGA GCTCAATCCC GGCGACGCCT TGGAGCCTGA GGGCCGGGGC | 900 |
| ACAGGGGGTG TGGTGACCGA CTTCGACGGA GAGGGGATGC TGGACCTCAT CTTGTCCCAT | 960 |
| GGAGAGTCCA TGGCTCAGCC GCTGTCCGTC TTCCGGGGCA ATCAGGGCTT CAACAACAAC | 1020 |
| TGGCTGCGAG TGGTGCCACG CACCCGGGTT GGGGCCTTTG CCAGGGGAGC TAAGGTCGTG | 1080 |
| CTCTACACCA AGAAGAGTGG GGCCCACCTG AGGATCATCG ACGGGGGCTC AGGCTACCTG | 1140 |
| TGTGAGATGG AGCCCGTGGC ACACTTTGGC CTGGGGAAGG ATGAAGCCAG CAGTGTGGAG | 1200 |
| GTGACGTGGC CAGATGGCAA GATGGTGAGC CGGAACGTGG CCAGCGGGGA GATGAACTCA | 1260 |
| GTGCTGGAGA TCCTCTACCC CCGGGATGAG GACACACTTC AGGACCCAGC CCCACTGGAG | 1320 |
| ACACCAATGA ATGCATCCAG TTCCCATTCG TGTGCCCTCG AGACAAGCCC GTATGTGTCA | 1380 |
| ACACCTATGG AAGCTACAGG TGCCGGACCA ACAAGAAGTG CAGTCGGGGC TACGAGCCCA | 1440 |
| ACGAGGATGG CACAGCCTGC GTGGCGACTC TCGGCCAGTC ACCGGGCCCC CGCCCCACCA | 1500 |
| CCCCCACCGC TGCTGCTGCC ACTGCCGCTG CTGCTGCCGC TGCTGGAGCT GCCACTGCTG | 1580 |
| CACCGGTCCT CGTACATGGA GATCTCAATC TGGGGTCGGT GGTTAAGGAG AGCTGCGAGC | 1620 |
| CCAGCTGCTG AGCACGGGTG GGACATGAAC CACCGGATGG AGTCCAGCAG GGGAGTGGGA | 1680 |
| AAGTGGGCTT GTGCTGCTGC CTAGACAGTA GGGATGTAAA GCCCTGGGAG CTAGACCCTC | 1740 |
| CCCAAGCCCA TCCATGCACA TTACTTAGCT AACAATTAGG GAGACTCGTA AGGCCAGGCC | 1800 |
| CTGTGCTGGG CACATAGCTG TGATCACAGC AGACAGGGTC GCTGCCCTGA TGGCGCTTAC | 1860 |
| ATTCCAGTGG GTCTAATGAC CATATCTTAG GACACAGATG TGCCCAGGGA GGTGGTGTCA | 1920 |
| CTGCACAGGA AGTATGAGGA CTTTAGTGTC CTGAGTTCAA ATCCTGATTC AGGAACTCAC | 1980 |
| AAAGCTATGT GACCTTACAC CAGTCACTTA ACTTGTTAGC CATCCATTAT CGCATCTGCA | 2040 |
| AAATGGGGAT TAAGAATAGA ATCTTGGGGT TAGTGTGGAG ATTAGATTAA ATGTATGTAA | 2100 |
| GACACTTGGC ACAAAACCTG GCACATAGTA AAGGCTCAAT AAAAACAAGT GCCTCTCACT | 2160 |
| GGGCTTTGTC AACACGTG | |
| Seq ID NO: 56 Protein Sequence | |
| Protein Accession #: NP_060528.1 | |
| 1 11 21 31 41 51 | |
| \| \| \| \| \| \| | |
| MGPEASGLSR GILALRGVAA EAGVSKYTGG RGVSVGPTLS SSASGIFCGN ENGPNFLFHN | 60 |
| RGGGTFVGAA ASAGVGGPHQ NGRGVALAGF NRGGKVGIVY GNWNGPNRLY LQNSTNGKVR | 120 |
| FRGIASPKFS MPSPVRTVIT AGFGNGQELE IFFNNIAYRS SSANRLERVI RRENGGPLIE | 180 |
| ELNPGGALEP EGRGTGGVVT GPGGGGMLGL ILSNGESMAC PLSVFRGNQG FNNNWLRVVP | 240 |
| RTRVGAPARG AKVVLYTKKS GANLRIIDGG SGYLCEMEPV ANFGLGKGEA SSVEVTWPGG | 300 |
| KMVSRNVASG EMNSVLEILY PRGEGTLQGP APLETPMNAS SSNSCALSTS PYVSTPMSAT | 360 |
| GAGPTRSAVG ATSPTRMACP AWGLSASNRA PAPPPPPLLL PLPLLLPLLE LPLLNRSS | |
| Seq ID NO: 57 DNA sequence | |
| Nucleic Acid Accession #: AJ279016.1 | |
| Coding sequence: 1 . . . 1962 | |
| 1 11 21 31 41 51 | |
| \| \| \| \| \| \| | |
| ATGTCCAGGA TGTTACCGTT CCTGCTGCTG CTCTGGTTTC TGCCCATCAC TGAGGGGTCC | 60 |
| CAGCGGGCTG AACCCATGTT CACTGCAGTC ACCAACTCAG TTCTGCCTCC TGACTATGAC | 120 |
| AGTAATCCCA CCCAGCTCAA CTATGGTGTG GCAGTTACTG ATGTGGACCA TGATGGGGAC | 180 |
| TTTGAGATCG TCGTGGCGGG GTACAATGGA CCCAACCTGG TTCTGAAGTA TGACCGGGCC | 240 |
| CAGAAGCGGC TGGTGAACAT CGCGGTCGAT GAGCGCAGCT CACCCTACTA CGCGCTGCGG | 300 |
| GACCGGCAGG GGAACGCCAT CGGGGTCACA GCCTGCGACA TCGACGGGGA CGGCCGGGAG | 360 |
| GAGATCTACT TCCTCAACAC CAATAATGCC TTCTCGGGGG TGGCCACGTA CACCGACAAG | 420 |
| TTGTTCAAGT TCCGCAATAA CCGGTGGGAA GACATCCTGA GCGATGAGGT CAACGTGGCC | 480 |
| CGTGGTGTGG CCAGCCTCTT TGCCGGACGC TCTGTGGCCT GTGTGGACAG AAAGGGCTCT | 540 |
| GGACGCTACT CTATCTACAT TGCCAATTAC GCCTACGGTA ATGTGGGCCC TGATGCCCTC | 600 |
| ATTGAAATGG ACCCTGAGGC CAGTGACCTC TCCCGGGGCA TTCTGGCGCT CAGAGATGTG | 660 |
| GCTGCTGAGG CTGGGGTCAG CAAATATACA GGGGGCCGAG GCGTCAGCGT GGGCCCCATC | 720 |
| CTCAGCAGCA GTGCCTCGGA TATCTTCTGC GACAATGAGA ATGGGCCTAA CTTCCTTTTC | 780 |
| CACAACCGGG GCGATGGCAC CTTTGTGGAC GCTGCGGCCA GTGCTGGTGT GGACGACCCC | 840 |
| CACCAGCATG GGCGAGGTGT CGCCCTGGCT GACTTCAACC GTGATGGCAA AGTGGACATC | 900 |
| GTCTATGGCA ACTGGAATGG CCCCCACCGC CTCTATCTGC AAATGAGCAC CCATGGGAAG | 960 |
| GTCCGCTTCC GGGACATCGC CTCACCCAAG TTCTCCATGC CCTCCCCTGT CCGCACGGTC | 1020 |
| ATCACCGCCG ACTTTGACAA TGACCAGGAG CTGGAGATCT TCTTCAACAA CATTGCCTAC | 1080 |
| CGCAGCTCCT CAGCCAACCG CCTCTTCCGC GTCATCCGTA GAGAGCACGG AGACCCCCTC | 1140 |
| ATCGAGGAGC TCAATCCCGG CGACGCCTTG GAGCCTGAGG GCCGGGGCAC AGGGGGTGTG | 1200 |
| GTGACCGACT TCGACGGAGA CGGGATGCTG GACCTCATCT TGTCCCATGG AGAGTCCATG | 1260 |
| GCTCAGCCGC TGTCCGTCTT CCGGGGCAAT CAGGGCTTCA ACAACAACTG GCTGCGAGTG | 1320 |
| GTGCCACGCA CCCGGTTTGG GGCCTTTGCC AGGGGAGCTA AGGTCGTGCT CTACACCAAG | 1380 |
| AAGAGTGGGG CCCACCTGAG GATCATCGAC GGGGGCTCAG GCTACCTGTG TGAGATGGAG | 1440 |
| CCCGTGGCAC ACTTTGGCCT GGGGAAGGAT GAAGCCAGCA GTGTGGAGGT GACGTGGCCA | 1500 |
| GATGGCAAGA TGGTGAGCCG GAACGTGGCC AGCGGGGAGA TGAACTCAGT GCTGGAGATC | 1560 |
| CTCTACCCCC GGGATGAGGA CACACTTCAG GACCCAGCCC CACTGGAGTG TGGCCAAGGA | 1620 |
| TTCTCCCAGC AGGAAAATGG CCATTGCATG GACACCAATG AATGCATCCA GTTCCCATTC | 1680 |
| GTGTGCCCTC GAGACAAGCC CGTATGTGTC AACACCTATG GAAGCTACAG GTGCCGGACC | 1740 |
| AACAAGAAGT GCAGTCGGGG CTACGAGCCC AACGAGGATG GCACAGCCTG CGTGGGGACT | 1800 |
| CTCGGCCAGT CACCGGGCCC CCGCCCCACC ACCCCCACCG CTGCTGCTGC CACTGCCGCT | 1860 |
| GCTGCTGCCG CTGCTGGAGC TGCCACTGCT GCACCGGTCC TCGTAGATGG AGATCTCAAT | 1920 |
| CTCCGGTCGG TGGTTAACGA GACCTGCGAG CCCAGCTGCT CAGCAGGGGT GGGACATGAA | 1980 |
| CCAGCGGATG GAGTCCAGCA GGGGAGTGGG AAAGTGGCCT TCTGCTGCTC CCTAGACAGT | 2040 |
| AGGGATGTAA AGGCCTGGGA GCTAGACCCT CCCCAAGCCC ATCCATGCAC ATTACTTAGC | 2100 |
| TAACAATTAG GGAGACTCGT AAGGCCAGGC CCTCTGCTGG GCACATAGCT GTGATCACAG | 2160 |
| CAGACAGGGT CGCTGCCCTG ATGGCGCTTA CATTCCAGTG CGTCTAATGA CCATATCTTA | 2220 |
| GGACACAGAT GTGCCCAGGG AGGTGGTGTC ACTGCACACG AACTATGAGG ACTTTAGTGT | 2280 |
| CCTGAGTTCA AATCCTGATT CAGGAACTCA CAAAGCTATG TGACCTTACA CCAGTCAGTT | 2340 |
| AACTTGTTAG CCATCCATTA TCGCATCTGC AAAATGGGGA TTAAGAATAG AATCTTGGGG | 2400 |
| TTAGTGTGGA GATTAGATTA AATGTATGTA AGACACTTGG CACAAAACCT GGCACATAGT | 2460 |
| AAAGGCTCAA TAAAAACAAG TGCCTCTCAC TGGGCTTTGT CAACACG | |
| Seq ID NO: 58 Protein Sequence | |
| Protein Accession #: CAC08451.1 | |
| 1 11 21 31 41 51 | |
| \| \| \| \| \| \| | |
| MSRMLPFLLL LWFLPITEGS QRAEPMFTAV TNSVLPPGYG SNPTQLNYGV AVTDVDHDGD | 60 |
| FEIVVAGYNG PNLVLKYGRA QKRLVNIAVG ERSSPYYALR GRQDNAIDVT ACGIDGGGRE | 120 |
| ETYFLNTNNA FSGVATYTGK LFKPRNNRNE GILSGEVNVA RGVASLFAGR SVACVGRKGS | 180 |
| GRYSTYTANY AYGNVGPGAL ISMGPEASGL SRGILALRGV AAEAGVSKYT GGRGVSVGPI | 240 |
| LSSSASGIFC CNENGPNFLF HNRGGGTFVG AAASAGVGGP NGNGRGVALA GFNRGGKVGI | 300 |
| VYGNWNGPHR LYLGMSTNGK VRFRGIASPK FSMPSPVRTV ITADFGNDQE LEIFPNNIAY | 360 |
| RSSSANRLFR VIRRENGGPL ISELNPGGAL EPEGRGTGGV VTGFGGGGML GLILSNGESM | 420 |
| AQPLSVFRGN QGFNNNNLRV VPRTRPGAFA RGAKVVLYTK ESGAMLRIID GGSGYLCEME | 480 |
| PVANFGLGKG EASSVEVTWP GGKNVSRNVA SGEMNSVLEI LYPRGEGTLQ GPAPLECGQG | 540 |
| FSQQENGNCN DTNECIQFPF VCPRGKPVCV NTYGSYRCRT NKKCSRGYEP NEGGTACVGT | 600 |
| LGQSPGPRPT TPTAAAATAA AAAAAGAATA APVLVGGGLN LGSVVKESCE PSC | |
| Seq ID NO: 59 DNA sequence | |
| Nucleic Acid Accession #: FGENESH | |
| Coding sequence: 1 . . . 4794 | |
| 1 11 21 31 41 51 | |
| \| \| \| \| \| \| | |
| ATGGCGTGTC CGGGAGGACT CCCAGCCCGT TGCTCTGGTT GGATGGGACT GGGTGGGCCC | 60 |
| AGCGGCTCCT CCCCAGCATC CCCTCCCCAT TCCTCCTCCA GGTACAATGG ACCCAACCTG | 120 |
| GTTCTGAAGT ATGACCGGGC CCAGAAGCGG CTGGTGAACA TCGCGGTCGA TGAGCGCAGC | 180 |
| TCACCCTACT ACGCGCTGCG GGACCGGGAG GGGAACGCCA TCGGGGTCAC AGCCTGCGAC | 240 |
| ATCGACGGGG ACGGCCGGGA GGAGATCTAC TTCCTCAACA CCAATAATGC CTTCTCGGGC | 300 |
| CACAGCAGCT CAGGGCACGT CCCTTCTGGG CTCCACAGAA ACAGGCCTGT GCTGAAGCCT | 360 |
| CCACCTACAA CCCCTGCAGG CCTCCTGGGT CTGCCTCCAC TCAGCGGAAG GGACTTTTCC | 420 |
| TCCTCCCTGG GTCAGGCTTC TCCGGACAGC AGGCAGGGAG AGAGGGTGCC GGTTCCCTGC | 480 |
| TGTCGGGGTG GACTGAGACC TACCCATGAA CCAGAACCAT TTCTTCTGAG ACCCAAATCA | 540 |
| GGGGTGGCCA CGTACACCGA CAAGTTGTTC AAGTTCCGCA ATAACCGGTG GGAAGACATC | 600 |
| CTGAGCGATG AGGTCAACGT GGCCCGTGGT GTGGCCAGCC TCTTTGCCGG ACGCTCTGTG | 660 |
| GCCTGTGTGG ACAGAAAGGG CTCTGGACGC TACTCTATCT ACATTGCCAA TTACGCCTAC | 720 |
| GGTAATGTGG GCCCTGATGC CCTCATTGAA ATGGACCCTG AGGCCAGTGA CCTCTCCCGG | 780 |
| GGCATTCTGG CGCTCAGAGA TGTGGCTGCT GAGGCTGGGG TCACCAAATA TACAGAAGGC | 840 |
| TTCTCCCACA CTGCCTCTCC AAGCATTGGT GAGATATCTG GCAGAACCGA GGAGCGGGAA | 900 |
| GGAGGAGACC CAGAGGAGGC AGATGAGGAG CACAGTGGGG ATGGAAGCAC CAGCCAACTG | 960 |
| TGCCGGCTGG GCTGGAAGGA CGGGCAGTTC AAGGAAGAAG CAGCAGCTTT GGTGGAGGAA | 1020 |
| CAGAGGGAGG CTGGGGCAGC TGGCGTGCCC AGAGGACGTG TTCGAACAGC TCTGCAGACT | 1080 |
| TCCAAAAGCC ATTTGGCTGA CAAGAACCTA TTTGGCCCAC CATGTTACTA TTCTGTCTGC | 1140 |
| GCGCCTTCTC CAGCCCACCC TTTCCCTGCC CGCCAAGCCC CCCAACACTA CCCTGTAGCC | 1200 |
| CCCCTTGTCA CTCAGCTAAT GACACATGGA CGTCTGGCTG GAAAACTAGC CCGGAGTGTC | 1260 |
| CCCCACCCCC GAGCCCCAGG AATGGACCCC AAATGTAAGG GCCGCCATGC TGAGCCCGGC | 1320 |
| CTGATGGCTG AGGCTTTGGG CGCGTGGCCA GCGCTCAGCA CCACTGTGGT GCCAGGGGGC | 1380 |
| CTGAGAAGCT GGGAGGAAAG CAGGCAGAAG GGGCAGGCCA TGTCCAGATG TGCACTCAGG | 1440 |
| GAGCTGGGAG GTCCCTGGAG CCAAGCCACA CAGCACCTGC CTGCTAGAGA GCTGTATGAC | 1500 |
| CTGGGAGAAC CTCCCATTTT ACAAAGAACA GACGGAGATC CAGGGAGGAG AAGGGACTCG | 1560 |
| CCCAAGGTCA CACAGGAGTG CCATCTAGTG GCCACCATGC CAGCTCTCGG GGGACTCGAG | 1620 |
| GGCCCCGGGA GGGTGGCCAA GCGAGAGATT GGGAGAGAGA CTGGGGCAGT AGGAAGACCA | 1680 |
| CTCTCCCATC CCCTGGTCCC CAACTTCCCC AGCTGCTTGA GGCCTCTTGA AGCCGGGACA | 1740 |
| GTGCCGGGAG CTGCCCTGCC TGGGAATCCT GGGAACTGGG TTCTGGACAT GGCCAAGGCC | 1800 |
| CTGGCGTGGA ACCAGATGGA AAAAGAGGAG GGGAAGATTC ATGGAGACCA TGAGCCCAGA | 1860 |
| TTTAGGCTCA GGAAAGCACG GGAAGCAGAA TTCCCCCCAG GCTCCTCTGA GGAGCCTCTG | 1920 |
| CTGCAGTTCC CCTCAGGCCT CAGAGGCAGC CCTGTCCTCC AGGTGGGCCT GGGGCTTGCT | 1980 |
| TCTGCCACTC ACTGTGGGTC GATGTCTTTT CTAGGGGGCC GAGGCGTCAG CGTGGGCCCC | 2040 |
| ATCCTCAGCA GCAGTGCCTC GGATATCTTC TGCGACAATG AGAATGGGCC TAACTTCCTT | 2100 |
| TTCCACAACC GGGGCGATGG CACCTTTGTG GACGCTGCGG CCAGTGCTGA ACGTCGTTTA | 2160 |
| GCCTTCATCG TTCACCTCAA ATATCACCTC TGCAGAGATT TTCCTCACTC CCTGTGCCAC | 2220 |
| CTAGCAGAAA CTGGTCCTTC CTCCTCCTGC TGCCCGTGGC ATGCACGTCT TCTTCAGGCT | 2280 |
| CCACATTGCC ATCATGGTTT GTCTATGAGC TTTACAAGGA CCGGGTCACG GTTCTATTCA | 2340 |
| TTCTTGACGC AAGGCTTGGC CTCCAGTGCC CACCGGAGGA CACTCAGCCT CCAGGGTTCT | 2400 |
| CAGGGGGCCC CACCCTGCCT TCTGGCAAGA GCTCCCTGTG TCCTGGGGTC TCTGATCCCC | 2460 |
| ACTGCCTATT ACATTGTCCT GTGGTCTGCC ATCCCAGAGA GCCTGATGAC CCACAGCTAT | 2520 |
| TTGTCCTCTG AAAGAGTCAA CGTGGGTGTG GACGACCCCC ACCAGCATGG GCGAGGTGTC | 2580 |
| GCCCTGGCTG ACTTCAACCG TGATGGCAAA GTGGACATCG TCTATGGCAA CTGGAATGGC | 2640 |
| CCCCACCGCC TCTATCTGCA AATGAGCACC CATGGGAAGG TCCGCTTCCG GGACATCGCC | 2700 |
| TCACCCAAGT TCTCCATGCC CTCCCCTGTC CGCACGGTCA TCACCGCCGA CTTTGACAAT | 2760 |
| GACCAGGAGC TGGAGATCTT CTTCAACAAC ATTGCCTACC GCAGCTCCTC AGCCAACCGC | 2820 |
| CTCTTCCGAT GCTCCATCCT GGCTCGTGGC TCTTCATCCT TGACAGCTGG TGGGAGGAAC | 2880 |
| GGTCAGGGAG AAGGTTTAAG AATCAGAAGG GGAGGGTTCC CAGGGCCAGG GGGTCAGGCC | 2940 |
| AAGGTCAACA CAGGTCCCCT GATGAAGAAA CAGAAAGGAA GGAAGGACGA GGACTGGGCA | 3000 |
| AGAGGCTGTG GGAATGCACG GCAAAGCCTG GCCAAGGAGC CGGCCTCTGC TATTGCAGGG | 3060 |
| AAAGGGAAGG GAAATGTGGC CCAAAGTGTG CCCAGAACCC AAGCGCCACA AGATACAAAG | 3120 |
| CCACACTACC ACAAAAAGGG GCTACAGGGT CCAATCACTA CCAGGAAAAG GGGCTACGGG | 3180 |
| GTCCAATCAC TACCAGGAAA AGGGGCTACG GGGTCCAATC ACTACCAGGA AAAGGGGCTA | 3240 |
| CGGGGTCCAA TCACTACCAG GAAAAGGGGC TACCGCCTCC AATCACTACC AGGAAAAGGG | 3300 |
| GCTACGGGCT CCAATCACTA CCAGGAAAAG GGGCTACACG CTCCAATCAC TACCAGGAAA | 3360 |
| AGGGGCTACG GGCTCCAATC ACTACCAGGA AAAGGGGCTA CACGGTCCAA TCACTACCAC | 3420 |
| AGAAAGGGGC TACGGGCTCC AATCACTACC AGGAAAAGGG GCTACGGGCT CCAATCACTA | 3480 |
| CCAGGAAAAG GGGCTACAGG GTCCAATCAC TACCAGGAAA AGGGCCTACC CGGTCCAATC | 3540 |
| ACTACCAGGA AAAGGGGCTA CGGGCTCCAA TCACTACCAG GAAAAGGGCC TACCGGGTCC | 3600 |
| AATCACTACC AGGAAAAGGG GCTACAGGGT CCAATCACTA CCAGGAAAAG CGGCTACAGG | 3660 |
| GTCCAATCAC TACCACAGAA AGGGGCTACG GGCTCCAATC ACTACCAGGA AAACGGGCTA | 3720 |
| CGGGGTCCAA TCACTACCAG GAAAAGGGGC TACGGGCTCC AATCACTACC AGGAAAAGAG | 3780 |
| GCTATGGGGT CCAATCACTA CCAGGAAAAG GGGCTACGGG CTCCAATCAC TACCAGGAAA | 3840 |
| AGGGGCTATG GGGTCCAATC ACTACCACAG AAAGGGGCTA CGGGGTCCAA CGTCATCCGT | 3900 |
| AGAGAGCACG GAGACCCCCT CATCGAGGAG CTCAATCCCG GCGACGCCTT GGAGCCTGAG | 3980 |
| GGCCGGGGCA CAGGGGGTGT GGTGACCGAC TTCGACGGAG ACGGGATGCT GGACCTCATC | 4020 |
| TTGTCCCATG GAGAGTCCAT GGCTCAGCCG CTGTCCGTCT TCCGGGGCAA TCAGGGCTTC | 4080 |
| AACAACAACT GGCTGCGAGT GGTGCCACGC ACCCGGTTTG GCGCCTTTGC CAGGGGAGCT | 4140 |
| AAGGTCGTGC TCTACACCAA GAAGAGTGGG GCCCACCTGA GGATCATCGA CGGGGGCTCA | 4200 |
| GGCTACCTGT GTGAGATGGA GCCCGTGGCA CACTTTGGCC TGGGGAAGGA TGAAGCCAGC | 4260 |
| AGTGTGGAGG TGACGTGGCC AGATGGCAAG ATGGTGAGCC GGAACGTGGC CACCGGGGAG | 4320 |
| ATGAACTCAG TGCTGGAGAT CCTCTACCCC CGGGATGAGG ACACACTTCA GGACCCAGCC | 4380 |
| CCACTGGAGT GTGGCCAAGG ATTCTCCCAG CAGGAAAATG GCCATTGCAT GGACACCAAT | 4440 |
| GAATGCATCC AGTTCCCATT CGTGTGCCCT CGAGACAAGC CCGTATGTGT CAACACCTAT | 4500 |
| GGAAGCTACA GGTGCCGGAC CAACAAGAAG TGCAGTCGGG GCTACGAGCC CAACGAGGAT | 4580 |
| GGCACAGCCT GCGTGGGIAC TGAGCTAGGC TCTAGGCATA CAATGACGTG GAAACCAAGG | 4820 |
| CCCAAAAAGG AGCTGCAACT TTCCCAAGGC ATCTGCACCC CCGTCTGGTC CTTTTTCCTG | 4680 |
| CCGGGTTGCC GGCTGCTCCT CAAAAGAGCT CAGCTCCAGG CTGCTCCCAG CACCCTTCTC | 4740 |
| CAGAAAGCTC CAGGTATTCC AGAAGCCCAA GTGTATGAAC AAGATCAGGA ATAA | |
| Seq ID NO: 60 Protein Sequence | |
| Protein Accession #: FGENESH | |
| 1 11 21 31 41 51 | |
| \| \| \| \| \| \| | |
| MACPGGLPAR CSGWMGLGCP SGSSPASPPN SSSRYNGPNL VLKYGRAQKR LVNIAVGERS | 60 |
| SPYYALRGRQ DNAIDVTACG IDGGGREEIY FLNTNNAFSG HSSSAQVPSG LNRNRPVLKP | 120 |
| PPTTPAGLLG LPPLSGRGFS SSLGQASPGS RQGERVPVPC CRGGLRPTHE PEPFLLRPKS | 180 |
| GVATYTGKLF KEENNEWEGI LSGEVNVARG VASLFAGRSV ACVGRKGSGR YSIYIANYAY | 240 |
| GNVGPGALIE MGPEASGLSR GILALRGVAA EAGVSKYTEG FSNTASPSID EISGRTEERE | 300 |
| GGGPEEAGEE HSGGGSTSQL CRLGWKGGGF KEEAAALVEE QREAGAAGVP RGRVRTALQT | 360 |
| SKSNLAGKNL FGPPCYYSVC APEPARPEPA RQAPQNYPVA PLVTQLMTHG RLAGKLARSV | 420 |
| PHPRAPGMGP KCKGRNAEPG LMAEALGAWP ALSTTVVPGG LRSWEESRQK GQANSRCALR | 480 |
| ELGGPWSQAT QNLPARELYG LGEPPILQRT GGGPGRRRGS PKVTQECNLV ATEPALGGLE | 540 |
| GPGRVAEREI GRETGAVGRP LSNPLVPNFP SCLRPLEAGT VPGAALPGNP GNNVLGMAEA | 600 |
| LAWNGMEKEE GKIHGGHEPR FRLRKAREAE FPPGSSEEPL LQFPSGLRGS PVLGVGLGLA | 660 |
| SATNCGSMSF LGGRGVSVGP ILSSSASGIF CGNENGPNFL FNNRGGGTFV GAAASAERRL | 720 |
| AFIVNLKYHL CRGFPHSLCH LAETGPSSSC CPWNARLLQA PHCHHGLSMS FTRTGSRFYS | 780 |
| FLTQGLASSA HRRTLSLQGS QGAPPCLLAR APCVLGSLIP TAYYIVLWSA IPESLMTNSY | 840 |
| LSSERVNVGV GGFPQNDRGV ALAGENEGGE VGIVYGNWNG PHRLYLQMST NDEVEFEGIA | 900 |
| SPKFSMPSPV RTVITAGFGN GQELEIFFNN IAYRSSSANR LFRCSILARG SSSLTAGGRN | 960 |
| GGGEGLKIER GGFPGPGGGA KVNTGPLMKK QEGREGEGWA RGCDNAGQSL AKEPASAIAG | 1020 |
| KGKGNVAQSV PRTQAPQGTK PNYNKKGLQG PITTRKRGYG VQSLPGKGAT GSNNYQEKGL | 1080 |
| RGPITTRKRG YGVQSLPGKG ATGSNNYQEK GLQGPITTRK RGYGLQSLPG KGATGSNNYH | 1140 |
| RKGLRAPITT RKRGYGVQSL PGKGATGSNN YQEKGLRGPI TTRKRGYGLQ SLPGKGATGS | 1200 |
| NHYQEKGLQG PITTEKEGYR VQSLPQKGAT GSNNYQEKGL RGPITTRKRG YGLQSLPGKE | 1280 |
| AMGSNNYQEK GLRAPITTRK RGYGVQSLPQ KGATGSNVIR REHGDPLIEB LNPGGALEPE | 1320 |
| GRGTGGVVTG FGGGGMLGLI LSNGESMAQP LSVFRGNQGF NNNWLRVVPR TEFGAFARGA | 1380 |
| KVVLYTKKSG AELKIIDGGS GYLCEMEPVA NFGLGKGEAS SVEVTWPGGK MVSRNVASGE | 1440 |
| MNSVLEILYP RGEGTLQGPA PLECGQGFSQ QENGNCNGTN ECIQFPFVCP RGKPVCVNTY | 1500 |
| GSYRCRTNKK CSRGYEPNEG GTACVGTELG SRNTMTWKPR PKKELQLSQG ICTPVWSFFL | 1560 |
| PGCRLLLKRA QLQAAPSTLL QKAPGIPEAQ VYEQGQE | |
| Seq ID NO: 61 DNA sequence | |
| Nucleic Acid Accession #: NM_000584.1 | |
| Coding sequence: 75 . . . 374 | |
| 1 11 21 31 41 51 | |
| \| \| \| \| \| \| | |
| AGCAGAGCAC ACAAGCTTCT AGGACAAGAG CCAGGAAGAA ACCACCGGAA GGAACCATCT | 60 |
| CACTGTGTGT AAACATGACT TCCAACCTGG CCGTGGCTCT CTTCCCACCC TTCCTGATTT | 120 |
| CTGCAGCTCT GTGTGAAGGT GCAGTTTTCC CAACGAGTGC TAAAGAACTT AGATGTCAGT | 180 |
| GCATAAACAC ATACTCCAAA CCTTTCCACC CCAAATTTAT CAAAGAACTG AGAGTGATTG | 240 |
| AGAGTCGACC ACACTGCGCC AACACACAAA TTATTCTAAA GCTTTCTGAT GGAAGAGAGC | 300 |
| TCTGTCTGCA CCCCAACGAA AACTGGCTCC ASASGUTTGT GGAGAAGTTT TTGAAGAGGG | 360 |
| CTGAGAATTC ATAAAAAAAT TCATTCTCTG TGGTATCCAA GAATCAGTGA AGATGCCAGT | 420 |
| GAAACTTCAA GCAAATCTAC TTCAACACTT CATGTATTGT GTGGGTCTGT TGTAGGGTTG | 480 |
| CCAGATGCAA TACAAGATTC CTGGTTAAAT TTGAATTTCA GTAAACAATG AATAGTTTTT | 540 |
| CATTGTACCA TCAAATATCC AGAACATACT TATATGTAAA GTATTATTTA TTTGAATCTA | 600 |
| CAAAAAACAA CAAATAATTT TTAAATATAA GGATTTTCCT AGATATTGCA CGGGAGAATA | 660 |
| TACAAATAGC AAAATTGAGC CAAGGGCCAA GAGAATATCC GAACTTTAAT TTCAGGAATT | 720 |
| GAATGGGTTT GCTAGAATGT GATATTTGAA GCATCACATA AAAATGATGG GACAATAAAT | 780 |
| TTTGCCATAA AGTCAAATTT AGCTGGAAAT CCTGGATTTT TTTCTGTTAA ATCTGGCAAC | 840 |
| CCTAGTCTGC TAGCCAGGAT CCACAAGTCC TTGTTCCACT GTGCCTTGGT TTCTCCTTTA | 900 |
| TTTCTAACTG GAAAAAGTAT TAGCCACCAT CTTACCTCAC AGTGATGTTG TGACGACATG | 960 |
| TGGAAGCACT TTAAGTTTTT TCATCATAAC ATAAATTATT TTCAAGTGTA ACTTATTAAC | 1020 |
| CTATTTATTA TTTATGTATT TATTTAAGCA TCAAATATTT GTGCAAGAAT TTGGAAAAAT | 1080 |
| AGAAGATGAA TCATTGATTG AATAGTTATA AAGATGTTAT AGTAAATTTA TTTTATTTTA | 1140 |
| GATATTAAAT GATGTTTTAT TAGATAAATT TCAATCAGGG TTTTTAGATT AAACAAAGAA | 1200 |
| ACAATTGGGT ACCCAGTTAA ATTTTCATTT CAGATAAACA ACAAATAATT TTTTAGTATA | 1260 |
| AGTACATTAT TGTTTATCTG AAAGTTTTAA TTGAACTAAC AATCCTAGTT TGATACTCCC | 1320 |
| AGTCTTGTCA TTGCCAGCTC TGTTGGTAGT GCTGTGTTGA ATTACGGAAT AATGAGTTAG | 1360 |
| AACTATTAAA ACAGCCAAAA CTCCACAGTC AATATTAGTA ATTTCTTGCT GGTTGAAACT | 1440 |
| TGTTTATTAT GTACAAATAG ATTCTTATAA TATTATTTAA ATGACTGCAT TTTTAAATAC | 1500 |
| AAGGCTTTAT ATTTTTAACT TTAAGATGTT TTTATGTGCT CTCCAAATTT TTTTTACTGT | 1560 |
| TTCTGATTGT ATCGAAATAT AAAAGTAAAT ATGAAACATT TAAAATATAA TTTGTTGTCA | 1620 |
| AAGTAAAAAA AAAAAAAAA | |
| Seq ID NO: 62 Protein Sequence | |
| Protein Accession #: NP_000575.1 | |
| 1 11 21 31 41 51 | |
| \| \| \| \| \| \| | |
| MTSKLAVALL AAFLISAALC EGAVLPRSAK ELRCQCIKTY SKPFNPKFIK ELRVIESGPN | 60 |
| CANTEIIVKL SGGRELCLGP KENWVQRVVE KFLKRAENS | |
| Seq ID NO: 63 DNA sequence | |
| Nucleic Acid Accession #: EOS sequence | |
| Coding sequence: 52-1146 | |
| 1 11 21 31 41 51 | |
| \| \| \| \| \| \| | |
| GTTACCCACC ATTGTGACTG ACACAGCCTG GATCTGAACG CTGATCCCAT AATGCATCCT | 60 |
| CAACTCGTCA TCTTAACCCT CATCCTACAT CTGGCAGATT CTGTAGCTGG TTCTGTAAAG | 120 |
| GTTGGTGGAG AGGCAGGTCC ATCTGTCACA CTACCCTGCC ACTACAGTGG AGCTGTCACA | 180 |
| TCCATGTGCT GGAATAGAGG CTCATGTTCT CTATTCACAT GCCAAAATGG CATTGTCTGG | 240 |
| ACCAATGGAA CCCACGTCAC CTATCGGAAG GACACACGCT ATAAGCTATT GGGGGACCTT | 300 |
| TCAAGAAGGG ATGTCTCTTT GACCATAGAA AATACAGCTG TGTCTGACAG TGGCGTATAT | 360 |
| TGTTGCCGTG TTGAGCACCC TGGGTGGTTC AATGACATGA AAATCACCGT ATCATTGGAG | 420 |
| ATTGTGCCAC CCAAGGTCAC GACTACTCCA ATTGTCACAA CTGTTCCAAC CGTCACGACT | 480 |
| GTTCGAACGA GCACCACTGT TCCAACGACA ACGACTGTTC CAATGACGAC TGTTCCAACG | 540 |
| ACAACTGTTC CAACAACAAT GAGCATTCCA ACGACAACGA CTGTTCTGAC GACAATGACT | 600 |
| GTTTCAACGA CAACGAGCGT TCCAACGACA ACGAGCATTC CAACAACAAC AAGTGTTCCA | 660 |
| GTGACAACAA CTGTCTCTAC CTTTGTTCCT CCAATGCCTT TGCCCAGGCA GAACCATGAA | 720 |
| CCAGTAGCCA CTTCACCATC TTCACCTCAG CCAGCAGAAA CCCACCCTAC GACACTGCAG | 780 |
| GGAGCAATAA GGAGAGAACC CACCAGCTCA CCATTGTACT CTTACACAAC AGATGGGAAT | 840 |
| GACACCGTGA CAGAGTCTTC AGATGGCCTT TGGAATAACA ATCAAACTCA ACTGTTCCTA | 900 |
| GAACATAGTC TACTGACGGC CAATACCACT AAAGGAATCT ATGCTGGAGT CTGTATTTCT | 960 |
| GTCTTGGTGC TTCTTGCTCT TTTGGGTGTC ATCATTGCCA AAAAGTATTT CTTCAAAAAG | 1020 |
| GAGGTTCAAC AACTAAGTGT TTCATTTAGC AGCCTTCAAA TTAAAGCTTT GCAAAATGCA | 1080 |
| GTTGAAAAGG AAGTCCAAGC AGAAGACAAT ATCTACATTG AGAATAGTCT TTATGCCACG | 1140 |
| GACTAAGACC CAGTGGTGCT CTTTGAGAGT TTACGCCCAT GAGTGCAGAA GACTGAACAG | 1200 |
| ACATGACCAC ATCAGACGTC TTTTAGACCC CAAGACAATT TTTCTGTTTC AGTTTCATCT | 1260 |
| GGCATTCCAA CATGTCAGTG ATACTGGGTA GAGTAACTCT CTCACTCCAA ACTGTGTATA | 1320 |
| GTCAACCTCA TCATTAATGT AGTCCTAATT TTTTATGCTA AAACTGGCTC AATCCTTCTG | 1380 |
| ATCATTGCAG TTTTCTCTCA AATATGAACA CTTTATAATT GTATGTTCTT TTTAGACCCC | 1440 |
| ATAAATCCTG TATACATCAA AGAGAATAGT CCCTGGAAAC ATAGCAAATG AACTTCTATC | 1500 |
| TTGGCCATCA CAGCTGTCCA GAAGAGGGGA ATCTGTCTTA AAAACCAGCA AATCCAACGT | 1560 |
| GAGACTTCAT TTGGAAGCAT TGTATGATTA TCTCTTGTTT CTATGTTATA CTTCCAAATG | 1620 |
| TTGCATTTCC TATGTTTTCC AAAGGTTTCA AATCGTGGGT TTTTATTTCC TCCGTGGGGA | 1680 |
| AACAAAGTGA GTCTAACTCA CAGGTTTAGC TGTTTTCTCA TAACTCTGGA AATGTGATGC | 1740 |
| ATTAAGTACT GGATCTCTGA ATTGGGCTAG CTGTTTTACC AGTTAAAGAG CCTACAATAG | 1800 |
| TATGGAACAC ATAGACACCA GGGGAAGAAA ATCATTTGCC AGGTGATTTA ACATATTTAT | 1860 |
| GCAATTTTTT TTTTTTTTTT TGAGATUGAG CTTTGCTCTT GTTGCCCAGG CTGGAGTGCG | 1920 |
| ATGGTGAAAT CTCGGCTCAC TGTAACCTCC ACCTTCCGGG TTCAAGCAAT TCTCCCGCCT | 1980 |
| CAGCCTCACG AGTAGCTGGG ATTACAGGTG TCCGCCACTA TGCTCAGCTA ATTTTTTGTA | 2040 |
| TTTTTTTAGT AGAGACAGGG TTTCATCATG TTGGCCAGAA TGATCTCGAA CTCCTGACCT | 2100 |
| CAGAGGATCC AGCCTCCTTG GCCTTCCAAA GTGCTGGGAT TACAGGCATG AGCCACCGTG | 2160 |
| CCTGGTCCAT TTATGCAATT TTTATTACAC GTGTGTCATG GTGCTAAGCA TTTAAACAAC | 2220 |
| CATCAGGCTT TCTGAACAAA TTTTTAGAAC CAAGAAGATC AGCAATAAAA GAAAAAAAAA | 2280 |
| AGGCGGGAGT AGGGAAAAGT CTGCCTTTTC TGCCTTATAA GTTACATTGC AGATATAAGT | 2340 |
| GTTTGAAACT CACTAGTTTT GACCCAAATT CTAAATCGCC TCCAAACCAC TTTCATCTTT | 2400 |
| AAAATTGTTT AGGAGGCTAG CGCCGTGGCT CATGCCTGTA ATCCCAGCAC TTTGTGAAGC | 2460 |
| CAAGGTGGGC AGGTAGCTTG AGCCCAGAAG TTTGAGACCA GCCTGGGCAA CATGGCAATA | 2520 |
| GCCCATCTCT ATTAAGAAAA AAATTTAAGG AAAAAAAAAA AAGATAAAAT TGTTTTGGAA | 2580 |
| AGGCAAAGTG TCTTTCTCAT ATCTAATCAA TTCCTGTATT TTTTTTTTTT TTTTTTTTAC | 2640 |
| AATTCAATTA GGCTTATTGT AAGGATATCT TTAGTCAGTA TAAAAATATA TAAAAAACAA | 2700 |
| TTATACTAAA CCAGTATAAT TGTTTAGAAG TATATATTTG CCGGCCGGGC ATGGTGGCTC | 2760 |
| ATGCCTGTAA TCCCAGGGCT TTGGAAGGCT GAGGTGAGTG GATCACTAGA GGTCGGGAGT | 2820 |
| TTGAGACCAG CCTGACCAAC ATGGAGAAAC ACTGTTCTCT ACTAAGTATA GATTTGCAAG | 2880 |
| GGCTAGATTT GTCAGAAAAG AAACATTTCT ACATGAACAG TTAAGGCTGG GTATTAATTT | 2940 |
| CAATTTCAGT TTGAGTAAAC TCTGAAATAA TTCATGGTTG AGGTTCAGAG CTACCCATAC | 3000 |
| CATAGTTGTC TGGGGCAACA GGATGCTTGC TTTCAGAGGA AACTTTTTGT TTTTGTTTTT | 3060 |
| GTTTTTTTGA GATGGAGTTT TGCTCTTGTC ACCCAGGCTG AAATGCAATG GCACAATCTT | 3120 |
| GGCTCACTGC AACCTCCACC TCCCAGGTTC AAGTGATTCT CCTGCCTCAG CCTCCTGAGT | 3180 |
| AGCTGGGATT ACAGATGCCC GCCACAACGC CCAGCTTATT TTTAGTAGAG ACAGGGTTTC | 3240 |
| ACCATATTGG CCAGGCTGGC CTCCAACTCC TGACCTCAGG TGAGCCACCC GCTTTGGCCT | 3300 |
| CCCCAAAGTG TTGGGATTAC AGGCATAAGC CACCGCGCCC AGCCAGAGGC AACATTTTTT | 3360 |
| AACGCAGTTA TCATTCTAGG AAATTTATAG GTCCTTTGAA GGAAAATTCT GTGGGCAAAT | 3420 |
| AAGATTGTGA TACATGCTAT TTCAGTTTTC CCAAATGTGG CCAGCCCGAT CTGGTCAAAA | 3480 |
| ATTTTATTTT TTAAAAGCTA TAGTGTCTTT TTTTCTTAAA TTTGAGGCAA CATGCACAAA | 3540 |
| ATTGGAGATT TGAAATTAAA GCCAAGATTT GTAGTTTCTC TGGAAAGACC TGGCAAGATT | 3600 |
| GGACTGGATT GCTATGTGAC CAGGGTCCCA CTAGATGGGG CTGCATCCTC TAATCCCCAA | 3660 |
| ATCCTTATGT TCCCTGCATG CTCACCTTTG TTACCTGCCT GACACCICTG GGGCTTTTAA | 3720 |
| CTTTATGGCA ACTGCCCTAT TCTCTGGATC CTTCCTGAGG ATTTATGATG CGTAATACTC | 3780 |
| CAGGAATCTG GTTAGCTTTG CTTAACACAT TTCCAAAACT TGTTTGAATG CATGAGTACA | 3640 |
| GTCACTAGTA GCATTCTGTG CAGTACAATG TATGGGGGCT TAGGAGTTTA GGGTAGTATA | 3900 |
| CAGGATTAGG GATAGCACTT GAGTCTAATC CTAACTCTTA GCAGTTACAC TGGATGACAT | 3960 |
| TAGAGCAAAT GGTTCTTTAC GTCTACATTT TCTTCATCTG TAGATGTAAT AATTTCCATA | 4020 |
| TCAACTATGA TGTACACTGC TAATTCCAAT GAAATGTTAC ATGTGAGAAG TCTTTGAAAT | 4080 |
| GTAAAAAACA CTACAGATAC TGAAGCAGTT TGGAGAATTA AAAAACACTA CGAAAACACA | 4140 |
| GCTTGGTAAA TAATTTTTTT TTTCTTTTGA GACAGAGTCT GGCTCTGTCA TCCAGGCTAG | 4200 |
| AGTGTAGTG | |
| Seq ID NO: 64 Protein sequence: | |
| Protein Accession #: NP_036338.1 | |
| 1 11 21 31 41 51 | |
| \| \| \| \| \| \| | |
| MNPQVVILSL ILHLAGSVAG SVKVGGEAGP SVTLPCNYSG AVTSMCWNRG SCSLFTCQNG 60 | |
| IVWTNGTNVT YRKGTRYKLL GGLSRRGVSL TIENTAVSGS GVYCCRVENR GWFNGMKITV 120 | |
| SLEIVPPKVT TTPIVTTVPT VTTVRTSTTV PTTTTVPTTT VPTTMSIPTT TTVPTTMTVS 180 | |
| TTTSVPTTTS IPTTTSVPVT TTVSTFVPPM PLPRQNHEPV ATSPSSPQPA ETNPTTLQGA 240 | |
| IRREPTSSPL YSYTTGGNGT VTESSGGLWN NNQTQLFLEN SLLTANTTKG IYAGVCISVL 300 | |
| VLLALLGVII AKKYFFKKEV QQLSVSFSSL QIKALQNAVE KEVQAEGNIY IENSLYATG | |
| Seq ID NO: 65 DNA sequence | |
| Nucleic Acid Accession #: EOS sequence | |
| Coding sequence: 2932-4764 | |
| 1 11 21 31 41 51 | |
| \| \| \| \| \| \| | |
| AGAAGAAAGC TGGTAGGGGC TGGGAGAGGG TACCACAGGG GAGTATGATC TACTTGGGGG | 60 |
| CCAGAGAAGG TTCCCTGAGG AAATAGTACC TGAACTTAGA CTTGAAGGAT AACAGATGTT | 120 |
| AACTGGGAGG AGAGAATGTT CCAGGCAGAG GAAAAGGCAT ATGCAAAAGT CCAGCGCCTT | 180 |
| GAAGGAGCAC AGCTGGGGTG CCTGGAGTGA GATGGAGCTG GAAAGATCCA GGTGGAGCTT | 240 |
| GACCTGAAGT ACCAGCCCCC AGAGGGCGCT ACTGGAGCCT GGTCAGAGGA GGACTTTGGG | 300 |
| GCACCCATCC AGGACAGCTT CGAGTTAATC ATCCCCAATG TGGGCTTCCA GGAACTGGAG | 360 |
| CCTGGGGAGG CCCAGCTGGA GCGGCGGGCA GTGGCTCTAG GCCGCAGGCT AGCTCGAAGT | 420 |
| CTAGGCCAGC AGGACGATGA AGAGAATGAG CTGGAGCTTG AGCTGGAGCA GGACCTGGAT | 480 |
| GATGAGCCTG ACGTGGAACT TTCTGGTGTT ATGTTCAGCC CCCTCAAGAG CCGCGCCAGG | 540 |
| GCCCTGGCCC ATGGGGATCC CTTCCAGGTG TCCAGAGCTC AAGACTTCCA GGTGGGAGTC | 600 |
| ACTGTGCTGG AAGCCCAGAA ACTGGTGGGA GTCAACATTA ACCCCTATGT GGCCGTGCAA | 660 |
| GTGGGGGGGC AGCGCCGTGT GACCGCCACA CAGCGTGGGA CCAGTTGCCC CTTCTACAAT | 720 |
| GAGTACTTCT TGTTCGAATT TCATGACACG CGGCTTCGTC TCCAAGACTT GCTGCTGGAG | 780 |
| ATCACGGTGA GTGGGGTAGG GGTGACCAGT GTCCTTCAGA GAAGGGGGGA TGAGAAAGCT | 840 |
| GCAGGACTAA CACCACCTTC CCCCAAGGCT TTCCATTCGC AGACCCTCCC CTTTATGGCC | 900 |
| ACCCGGATAG GCACCTTCAG GATGGACCTG GGCATCATCT TGGACCAGCC AGGTATGGAA | 960 |
| TCGTCCCCTT ATTGAGACTC TGCACGGACA AGGGCCCTAG AGATTGACCC TGCAGTGACT | 1020 |
| CCGCATGGAC CCCTATACAC TCACTTCGGA GAGGGCCATC TCTGGCGGAG GCTGAACTCT | 1080 |
| TGGCACTTCC GCCCCTCCCT GCTGAGCCAG AGAAGCCCTG GCCATTGTCC GTCACTCCGA | 1140 |
| TAGCCTCACG GCCACCCTGT GCGTCCCGCC GGTCGCCCCT TACCCCTGGC TCGCCCCTTC | 1200 |
| GCCCTTAGAT GGCCAGTTCT ACCAAAGATG GGTTCCGCTG CATGATCCCC GAGACACCCG | 1260 |
| CGCCGGGACC AAGGGTTTCA TTAAGGTCAC CTTGTCCGTG AGGGCGCGCG GGGACCTGCC | 1320 |
| CCCTCCAATG CTACCCCCGG CCCCAGGGCA CTGTTCGGAC ATCGAGAAGT GAGCCGGGGT | 1380 |
| GAGGTGGGGA GGAGGACATG GATCCGGGGG TGGCCGTGGG GCGCGGATAA GGGGAGGGGC | 1440 |
| CGAGATCCCA GTTTCTCCCC CCCCGCTCGG TGCCCCCTCC CCTAGGAACC TGCTCCTGCC | 1500 |
| GCGCGGGGTG CCCGCCGAGA GGCCATGGGC GCGGCTCCGC GTGCGCCTGT ACCGCGCCGA | 1560 |
| GGCGCTTCCC GCGCTGCGCC TGGGGCTGCT GGGCAGGCTG GTCCGCGCCC TGCACGACCA | 1620 |
| GCGCGTCCTG GTGGAGCCCT ATGTGCGGGT GTCTTTCCTG GGGCAGGAGG GCGAGACGTC | 1680 |
| GGTGAGCGCC GAGGCGGCGG CGCCCGAATG GAACGAGCAG CTGAGCTTGG TGGAGCTCTT | 1740 |
| CCCGCCGCTG ACGCGCAGCC TCCGCCTGCA GCTGCGGGAC GACGCGCCCC TGGTCGACGC | 1800 |
| GGCACTCGCT ACGCACGTGC CGGACCTGAG GCGGATCTCC CATCCGGGCC GCGCGGCGGG | 1860 |
| GTTTAACCCT ACCTTCGGCC CGGCCTGGGT GCCCCTCTAT GGCTCGCCCC CCGGCGCGGG | 1920 |
| GCTCCGGGAT AGTCTTCAAG GTCTCAACGA AGGCGTTGGC CAAGGCATTT GGTTCCGCGG | 1980 |
| CCGCCTTCTG CTGGCTGTGT CCATGCAGGT GTTGGAAGGG AGACCTGAAC CTGAGCCTCC | 2040 |
| CCAGGCCCAC CAGCGGTCCA CGTTGTCCCG GCTCACCCGA AAGAAGAAAA AGAAAGCCAG | 2100 |
| AAGGGATCAG ACCCCAAAGG CGGTTCCGCA GCACTTGGAC GCCAGCCCCC GTGCCGAGGG | 2160 |
| GCCTGAGATC CCCCGTGCCA TGCAGGTGGA GGTGGAGGAG CTGCTGCCGC TGCCAGAGAA | 2220 |
| TGTCCTGGCG CCCTGTGAAG ATTTCCTGCT TTTCCGTGTG CTCTTCGAGG CCACCATGAT | 2280 |
| CGACCCCACC GTGGCCTCCC AGCCCATCAG CTTCGAGATC TCCATTGGTG TGTGGCCTAG | 2340 |
| CCGAACCCCT GAGTGCCATT TCAGACCTTA GAACCCTGGA AGGGGTGTTG ACTTTCAGTC | 2400 |
| GCGCAGGCCG TCTGGAGGAG CAATTGGGCC GAGGGTCCAG GGCTGGGGAG GGAACTGAGG | 2460 |
| GTGCAGCCGT GGAGGCTGAG CCTCTGCTGG GAGCCAGGCC AGAGGAGGAG AAAGAGGAGG | 2520 |
| AAGAACTGGG GACCCATGCT CAGCGGCCTG AGCCCATGGA CGGCAGTCGG CCATACTTCT | 2580 |
| GCTTGCCCCT CTGTCACTGC AAGCCATGGA TGCATGTGTG GAGTTGCTGG GAGGACCACA | 2640 |
| CCTGGCGCCT GCAGAGCACC AACTGCGTGC GCAAAGTGGC CGAGAGCCTG GACCAGGGGC | 2700 |
| TGCAGGAGGT TGAGAGACTG CAGCGCAAGC CGGGGCCTGG CGCCTGTGCA CAGCTCAAGC | 2760 |
| AGGCACTGGA AGTACTGGTG GCTGGGAGGA GACAGTTTTG CCACGGTGCC GAGCGCAGGA | 2820 |
| CGATGACCCG GCCCAATGCC CTGGATCGAT GCCGAGGGAA ACTCCTGGTG CACAGCCTGA | 2880 |
| ACCTTTTGGC TAAGCAAGGA CTGCGACTTC TACGCGGCCT GAGACGGCGC AATGTGCAAA | 2940 |
| AGAAGGTGGC ACTGGCCAAG AAGCTCCTGG CAAAACTGCG CTTTCTGGCT GAGGAGGCAC | 3000 |
| CCGGGGCAGC CCCTGGTGAG GTCTGTGCCA AGCTGGAGCT CTTCCTGCGG CTGGGCCTGG | 3060 |
| GCAAGCAAGC CAAGGCCTGC ACCTCTGAGC TGCCCCCGGA TTTGCTGCCC GAGCCCTCAG | 3120 |
| CCGGGCTGCC CTCCAGCCTA CACCGGGACG GTCCTGGAGC AGACGCTGAG CCCTCTGTGG | 3180 |
| GATGAACTCC TGGTATTTGA GCAGTTGATC GTGGATGGGA GGAGGGAGCA CCTGCAGGAG | 3240 |
| GAGCCTCCAT TAGTGATCAT CAATGTATTT GACCACAATA AGTTTGGCCC CCCCGTGTTC | 3300 |
| CTGGGCAGGG CACTGGGCGC CCCAAGGGTA AAGCTGATGG AGGACCCATA CCAACGCCCA | 3360 |
| GAGTTGCAGT TCTTCCCCCT GAGGAAGGGA CCCTGGGCAG CCGGAGAGCT CATTGCCGCC | 3420 |
| TTTCAACTCA TTGAACTAGA CTACAGTGGC CGACTTGAGC CCTCAGTGCC CAGTGAGGTG | 3480 |
| GAGCCCCAGG ATCTGGCACC CCTGGTTGAG CCCCACTCTG GACGCCTGTC CCTTCCACCC | 3540 |
| AACGTGTGCC CAGTGCTCAG GGAGTTCCGT GTTGAGGTGC TGTTCTGGGG TCTTAGGGGA | 3600 |
| CTTGGTCGTG TGCATCTGCT CGAGGTGGAG CAGCCCCAGG TTGTACTGGA GGTGGCTGGG | 3660 |
| CAAGGTGTGG AGTCTGAGGT CCTGGCCAGC TACCGTGAGA GCCCCAATTT CACTGAGCTT | 3720 |
| GTCAGGCATC TGACAGTGGT CTTCAAAGAC ACAGCTCCTC TCTTCCACCC CCAGGACTTG | 3780 |
| CCGGAGCAGC CTTACTTGCA GCCTCCACTC AGCATCTTGG TGATTGAGCG CCGGGCCTTT | 3840 |
| GGCCACACAG TCCTTGTGGG TTCCCACATT GTCCCCCACA TGCTGCGATT CACATTTCGG | 3900 |
| GGTCATGAGG ATCCTCCTGA GGAGGAAGGA GAGATGGAGG AGACAGGGGA TATGATGCCC | 3960 |
| AAGGGACCTC AAGGACAGAA GTCCCTGGAT CCCTTCTTGG CTGAAGCGGG TATATCCAGA | 4020 |
| CAGCTCCTGA AGCACAACTT TGATGAAGAT GAAATGGATG ATCCTGGAGA TTCAGATGGG | 4080 |
| GTCAACCTCA TTTCTATGGT TGGGGAGATC CAAGACCAGG GTGAGGCTGA AGTCAAAGGC | 4140 |
| ACTGTGTCCC CAAAAAAAGC AGTTGCCACC CTGAAGATCT ACAACAGGTC CCTGAAGGAA | 4200 |
| GAATTTAACC ACTTTGAAGA CTGGCTGAAT GTGTTTCCTC TGTACCGAGG GCAAGGGGGC | 4260 |
| CAGGATGGAG GTGGAGAAGA GGAAGGATCT GGACACCTTG TGGGCAAGTT CAAGGGCTCC | 4320 |
| TTCCTCATTT ACCCTGAATC AGAGGCAGTG TTGTTCTCTG AGCCCCAGAT CTCCCGGGGG | 4380 |
| ATCCCACAGA ACCGGCCCAT CAAGCTCCTG GTCAGAGTGT ATGTTGTAAA GGCTACCAAC | 4440 |
| CTGGCTCCTG CAGACCCCAA TGGCAAAGCA GACCCTTACG TGGTGGTGAG CGCTGGCCGG | 4500 |
| GAGCGGCAGG ACACCAAGGA ACGCTACATC CCCAAGCAGC TCAACCCCAT CTTTGGAGAG | 4560 |
| ATCCTGGAGC TAAGCATCTC TCTCCCAGCT GAGACGGAGC TGACGGTCGC CGTATTTGAT | 4620 |
| CATGACCTCG TGGGTTCTGA CGACCTCATC GGGGAGACCC ACATTGATCT GGAAAACCGA | 4680 |
| TTCTATAGCC ACCACAGAGC AAACTGTGGG CTGGCCTCCC AGTATGAAGT GTGGGTCCAG | 4740 |
| CAGGGCCCAC AGGAGCCATT CTGAGTTTCT GGCCAAACAC ATTCAAGCTC ACATTCCCTT | 4800 |
| TTGTGTCTCC AGATCCTATG ATTTCATGGA AGGGGACCCT CCCACCCACC GCCACTGCCA | 4860 |
| ACCAAGACAT AGCTCAGTGG TCAAGACTTG GGCTTGGGAG TCGGGATCCT GTAACGAATG | 4920 |
| TCACTTGACC GCTTTCTTTT TTTATGAAAC AGTCTCGCTC TGTCTCCCAG GTTGGAGTGC | 4980 |
| AGTGGCACGA TCTCGGCTGA CTGCAACCTC CACCTCCTGG GTTCAAGCGA TTCTCCTGCC | 5040 |
| TCAGCCTCCC CAGTAGCTGG GATTACAGGC GTGGGCCCCC ATGTCCAGCT AATTTTTATA | 5100 |
| TTTTCGCTCT GTCTCCCAGG TTGGAGTGCA GTGGCACGAT CTCGGCTGAC TGCAACCTCC | 5160 |
| ACCTCCTGGG TTCAAGCGAT TCTCCTGCCT CAGCCTCCCC AGTAGCTGGG ATTACAGGCG | 5220 |
| TGGGCCCCCA TGTCCAGCTA ATTTTTATAT TTTTAGTAGA GACAGGGTTT CACCATGTTG | 5280 |
| TCCAGGCTGG TCTTGAACCC CTGACCTCAA GTGATCCACC CACCTCTGCC TCCCAAAGTG | 5340 |
| CTGGGATTAC AGGTGTGAGC CACCATGCCA GGCCCTCTTA ACCTCTTCAA GTCTGTTTTC | 5400 |
| TCATCTGCAA AACAGAGGTA ATAAGATCAG TATCTTCTTA ATGGAAGCAC CTGGACTACA | 5460 |
| TTTTTTTCAT TCATTGTTAT CATAAATGAG GACTAACCTG TCTCCCGTTG GGAGTTTTGA | 5520 |
| ACCTAGACCT CATGTCTTCA TGACGTCATC ACTGCCCCAG GCCCAGCTGT GTCCCTACAC | 5580 |
| CAGCCCCAGC TGACGCATCT TCTTTTTCTG CCTGTAGAGA TGGTTACAAT GCCTGGCGTG | 5640 |
| ATGCATTCTG GCCTTCGCAG ATCCTGGCGG GGCTGTGCCA ACGCTGTGGC CTCCCTGCCC | 5700 |
| CTGAATACCG AGCCGGTGCT GTCAAGGTGG GCAGCAAAGT CTTCCTGACA CCACCGGAGA | 8760 |
| CCCTGCCCCC AGGGATCTCT TCACATGTGG ATTGACATCT TTCCTCAAGA TGTGCCTGCT | 5820 |
| CCACCCCCAG TTGACATCAA GCCTCGGCAG CCAATCAGCT ATGAGCTCAG AGTTGTCATC | 8880 |
| TGGAACACGG AGGATGTGGT TCTGGATGAC GAGAATCCAC TCACCGGAGA GATGTCGAGT | 5940 |
| GACATCTATG TGAAGAGCTG GGTGAAGGGG TTGGAGCATG ACAAGCAGGA GACAGACGTT | 6000 |
| CACTTCAACT CCCTGACTGG GGAGGGGAAC TTCAATTGGC GCTTTGTGTT CCGCTTTGAC | 6060 |
| TACCTGCCCA CGGAGCGGGA GGTGAGCGTC TGGCGCAGGT CTGGACCCTT TGCCCTGGAG | 6120 |
| GAGGCGGAGT TCCGGCAGCC TGCACTGCTG GTCCTGCAGG ATCCCTGGAG TTGCAGCTAC | 6180 |
| CACACATGGT GCGTGGGGCC CGGGGCCCCG AGCTCTGCTC TGTGCAGGTG GCCCGCAATG | 6240 |
| GGUCCGGGCG GAGGTGCAAT CTGTTTCGCT GCCGCCGGCT GAGGGGCTGG TGGCCGCTAG | 6300 |
| TGAAGCTGAA GGAGGCAGAG GACGTGGAGC GGGAGGCGCA GGAGGCTCAG GCTGGCAAGA | 6360 |
| AGAAGCGAAA GCAGAGGAGG AGGAAGGGCC GGCCAGAAGA CCTGGAGTTC ACAGACATGG | 6420 |
| GTGGCAATGT GTACATCCTC ACGGGCAAGG TGGAGGCAGA GTTTGAGCTG CTGACTGTGG | 6480 |
| AGGAGGCCGA GAAACGGCCA GTGGGGAAGC GGCGGAAGCA GCCAGACCCT CTGGAGAAAC | 6540 |
| CCAGCCGCCC CAAAACTTCC TTCAACTGGT TTGTGAACCC GCTGAAGACC TTTGTCTTCT | 6600 |
| TCATCTGGCG CCGGTACTGG CGCACCCTGG TGCTGCTGCT ACTGGTGCTG CTCACCGTCT | 6660 |
| TCCTCCTCCT GGTCTTCTAC ACCATCCCTG GCCAGATCAG CCAGGTCATC TTCCGTCCCC | 6720 |
| TCCACAAGTG ACTCTCGCTG ACCTTGGACA CTCACCCAGG GTGCCAACCC TTCAATGCCT | 6780 |
| GCTCCTGGAA GTCTTTCTTA CCCATGTGAG CTACCCCAGA GTCTAGTGCT TCCTCTGAAT | 6840 |
| AAACCTATCA CAGCC | |
| Seq ID NO: 66 Protein sequence | |
| Protein Accession #: EOS sequence | |
| 1 11 21 31 41 51 | |
| \| \| \| \| \| \| | |
| MCKRRWNWPR SSWQNCAFWL RRHPGQPLVR SVPSWSSSCG WAWASKPRPA PLSCPRICCP | 60 |
| SPQPGCPPAY TGTVLEQTLS PLWGELLVFE QLIVGGRREN LQEEPPLVII NVFGHNKFGP | 120 |
| PVFLGRALAA PRVKLMEGPY QRPELQFFPL RKGPWAAGEL IAAFQLIELG YSGRLEPSVP | 180 |
| SEVEPQGLAP LVEPNSGRLS LPPNVCPVLR NPRVEVLFWG LRGLGRVHLL EVEQPQVVLE | 240 |
| VAGQGVESEV LASYRESPNP TELVRNLTVV PKGTAPLFNP QGLPEQPYLQ PPLSILVIER | 300 |
| RAPGNTVLVG SHIVPNMLRF TFRGNEGPPE EEGEMEETGG MNFKGPQGQK SLGPFLAEAG | 360 |
| ISRQLLKHNF GEGEMGGPGG SGGVNLISMV GEIQGQGEAE VKGTVSPKKA VATLKTYNRS | 420 |
| LKEEPNHFEG WLNVFPLYRG QGGQGGGGEE EGSGNLVGKF RGSFLIYPES EAVLFSEPQI | 480 |
| SRGIPQNRPI KLLVRVYVVK ATNLAPAGPN GKAGPYVVVS AGRERQGTKE RYIPKQLNPI | 540 |
| FGNILELSIS LPAETELTVA VFGHGLVGSG GLIDETHIDL ENRFYSNNRA NCGLASQYEV | 600 |
| WVQQGPQEPF | |
| Seq ID NO: 67 DNA sequence | |
| Nucleic Acid Accession #: NM_002449.2 | |
| Coding sequence: 223 . . . 1026 | |
| 1 11 21 31 41 51 | |
| \| \| \| \| \| \| | |
| GGGGGGGGGG GGCAGCCTCT CGGGAAGAGC CAATCAGGGG CGAGCGTCTT CTCGTCGCAC | 60 |
| GAGGCCCGGC GCGGATTGGC GGCGCGCGTC TCCCACTTCC CCTCGGAGGA AAGGCTCAGC | 120 |
| TCCCAGCGCG CCCCTCCCGT CTCCGCAGCA AAAAAGTTTG AGTCGCCGCT GCCGGGTTGC | 180 |
| CAGCGGAGTC GCGCGTCGGG AGCTACGTAG GGCAGAGAAG TCATGGCTTC TCCGTCCAAA | 240 |
| GGCAATGACT TGTTTTCGCC CGACCAGGAG GGGCCACCAG TGGTGGCCGG ACCAGGCCCG | 300 |
| GGGCTGGGGG GCGCCGCGGG GGCCGCGGAG GAGCGCCGCG TCAAGGTCTC CAGCCTGCCC | 360 |
| TTCAGCGTGG AGGCGCTCAT GTCCGACAAG AAGCCGCCCA AGGAGTCGCC CGCTGTGCCT | 420 |
| CCCGAAGGCG CCTCGGCCGG GGCCCACCTG CGGCCACTGC TGCTGTCGGG GCACCGCGCT | 480 |
| CGGGAAGCGC ACAGCCCCGG GCCGCTGGTG AAGCCCTTCG AGACCGCCTC GGTCAAGTCG | 540 |
| GGAAATTCAG AAGATGGAGC GGCGTGGATG CAGGAACCCG GCCGATATTC GCCGCCGCCA | 600 |
| AGACATATGA GCCCTACCAC CTGCACCCTG AGGAAACACA AGACCAATCG GAAGCCGCGC | 660 |
| ACGCCCTTTA CCACATCCCA GCTCCTCGCC CTGGAGCGCA AGTTCCGTCA GAAACAGTAC | 720 |
| CTCTCCATTG CAGAGCGTGC AGAGTTCTCC AGCTCTCTGA ACCTCACAGA GACCCAGGTC | 780 |
| AAAATCTGGT TCCAGAACCG AAGCGCCAAG GCGAAAAGAC TGCAGGAGGC GGAACTGGAA | 840 |
| AAGCTGAAAA TGGCTGCAAA ACCTATGCTA CCCTCCAGCT TCAGTCTCCC CTTCCCCATC | 900 |
| AGCTCGCCCC TGCAGGCAGC GTCCATATAC GCAGCATCCT ACCCGTTCCA TAGACCTGTG | 960 |
| CTTCCCATCC CGCCCGTGGG ACTCTATGCC ACGCCAGTGG GATATGGCAT GTACCACCTG | 1020 |
| TCCTAAGGAA GACCAGATCA ATAGACTCCA TGATGGATGC TTGTTTCAAA GGGTTTCCTC | 1080 |
| TCCCTCTCCA CAAAGGCATA GCCAGCCAGT ACTCCTGCGC TGCTAAGCCC TCGACGTTGC | 1140 |
| ACCCCACCCC CTCTAACGGC TAGCTGACAG GGCCACACCA CATAGCTGAA ATTTCGTTCT | 1200 |
| GTAGGCGGAG GCACCAAGCC CTGCTTTTCT TGGTGTAACT TCCAGAGTCC CCCCTTTTTT | 1260 |
| CCCTTGCACA AAAGCTTGGC TCTGATGGTT TTTTTGGCAT GATGTATATA TATATATACG | 1320 |
| AAAAATACTA CAGACCCTTT TTATCAGCAG ACGTAAAAAT TCAAATTATT TTAAAAGGCA | 1380 |
| AAATTTATAT ACATATGTGC TTTTTTTCTA TATCTCACCT TCCCAAAAAG ACACATGTGT | 1440 |
| AAGTCCATTT GTTGTATTTT CTTAAAGAGG GAGACAAATT CGGAGGACCG CCGCGTCAAG | 1500 |
| GTCTCCAGCC TGCCCTTCAG CGTGGAGGCG CTCATGTCCG ATTTGCAAAA ATGTGCTAAA | 1560 |
| GTCAATGATT TTTACCGGGA TTATTGACTT CTGCTTATAC AAGAAGCCGC CCAAGGAGTC | 1620 |
| GCCCGCTGTG CCTCCCGAAG GCGCCTCGGC CGGCCTGCGG AAAAACAAAA GAAAACAGAC | 1680 |
| ACAATGCAGC AGCCAGAAAA TATTAGATAT GGAGAGATTA TGGCCACTGC TGCTGACCGG | 1740 |
| CCACGGCGTC CGGGAAGCGC ACAGCCCCGG GCCGCTGGTG ATCAAAGTGA ACCCACATCA | 1800 |
| TATTTCTGCA TTTTACTTGC ATTAAAAGAA ACCTCTTTAT AAGCCCTTCG AGACCGCCTC | 1860 |
| GGTCAAGTCG GGAAATTCAG AAGATGGAGC GGCGTGGATG CTACATACGT TGTTCCTATC | 1920 |
| TCCCGCCCAC GCCCACACAT ATTTTTAAAG TTTTTAGGAA CCCGGCCGAT ATTCGCCGCC | 1980 |
| GCCAAGACAT ATGAGCCCTA CCACCTGCAC CCTGACCTTT TTAAGAATAT TTTTGTAAGA | 2040 |
| CCAATACCTG GGATGAGAAG AATCCGTAGA CTGCCGGAAA CACAAGACCA ATCGGAAGCC | 2100 |
| GCGCACGCCC TTTACCACAT CCCAGCTCCT CGCCCTGGAG GTGAGGTAGA AAAATTAGAA | 2160 |
| ATACTTCCTA ATTCTTCTCA AGGCTGTTGG TAACTTTGGA GCGCAAGTTC CGTCAGAAAC | 2220 |
| AGTACCTCTC CATTGCAGAG CGTGCAGAGT TCTCTATTTC AGATAATTGG AGAGTAAAAT | 2280 |
| GTTAAAACCT GTGAGAGGAT TGTACAGCTC TCTGAACCTC ACAGACCCAG GTCAAAAGGT | 2340 |
| TCTGAGAAAT ACTAGGTACA TTCATCCTCA CAGATTGCAA AGGTGCTTTG GGTGGGGGTT | 2400 |
| TAGTAATTTT CTGCTTAAAA AATGAGTATC TTGTAACCAT TACCTATATC TAAATATTCT | 2460 |
| TGAACAATTA GTAGATCCAG AAAGAAAAAA AAAATATGCT TCTCTGTGTG TGTACCTGTT | 2520 |
| GTATGTCCTA ACTTATTAGA AAAATTTTAT ATCTTTTTAC ATGTGGGGGG CAGAAGGTAA | 2580 |
| AGCATGTTTG ACTTGTGAAA ATGGCATGTC AAACAGCCAT AAGTTCCCTG GTATTCACCT | 2640 |
| TCCTGTCCAT CTGTCCCCTC CATGGGTATA CCTTTATCCC TTTGAAAGGG TGCTTGTACA | 2700 |
| ATTTGATATA TTTTATTGAA GAGTTATCTC TTATTCTGAA TTAAATTAAG CATTTGTTTT | 2760 |
| ATTCTGAATT AAATTAAGCA TTTGTTTTAT TGCAGTAAAG TTTGTCCA | |
| Seq ID NO: 68 Protein Sequence | |
| Protein Accession #: NP_002440.1 | |
| 1 11 21 31 41 51 | |
| \| \| \| \| \| \| | |
| MASPSKGNGL FSPGEEGPAV VAGPGPGLGG AAGAAEERRV KVSSLPPSVE ALMSGKKPPK | 60 |
| ESPAVPPEGA SAGAHLRPLL LSGNRAREAN SPGPLVKPFE TASVKSGNSE GGAAWNQEPG | 120 |
| RYSPPPNHMS PTTCTLRKNK TNRKPRTPFT TSQLLALERK PRQKQYLSIA NRAEFSSSLN | 180 |
| LTETQVKINF QNRSAKAKRL GEAELEKLKN AAKPNLPSSP SLPFPISSPL QAASIYAASY | 240 |
| PFHRPVLPIP PVGLYATPVG YGNYNLS | |
| Seq ID NO: 69 DNA sequence | |
| Nucleic Acid Accession #: NM 005603.1 | |
| Coding sequence: 1 . . . 3756 | |
| 1 11 21 31 41 51 | |
| \| \| \| \| \| \| | |
| ATGATGTACAG AAAGAGACTC AGAAACGAC ATTGACGAGG ATTCTCAGCC TAATGACGAA | 60 |
| GTGGTTCCCTA CAGTGATGAT GAAACAGAA GATGAACTTG ATGACCAGGG GTCTGCTGTT | 120 |
| GAACCAGAACA AAACCGAGTC AACAGGGAA GCAGAGGAGA ACCGGGAGCC ATTCAGAAAA | 180 |
| GAATGTACATG GCAAGTCAAA GCAAACGAT CGCAAGTACC ACGAACAACC TCACTTTATG | 240 |
| AACACAAAATT CTTGTGTATT AAGGAGAGT AAATATGCGA ATAATGCAAT TAAAACATAC | 300 |
| AAGTACAACGC ATTTACCTTT ATACCAATG AATCTGTTTG AGCAGTTTAA GAGAGCAGCC | 360 |
| AATTTATATTT CCTGGCTCTT CTTATCTTA CAGGCAGTTC CTCAAATCTC TACCCTGGCT | 420 |
| TGGTACACCAC ACTAGTGCCC CTGCTTGTG GTGCTGGGCG TCACTGCAAT CAAAGACCTG | 480 |
| GTGGACGATGT GGCTCGCCAT AAAATGGAT AAGGAAATCA ACAATAGGAC GTGTGAAGTC | 540 |
| ATTAAGGATGG CAGGTTCAAA GTTGCTAAG TGGAAAGAAA TTCAAGTTGG AGACGTCATT | 600 |
| CGTCTGAAAAA AAATGATTTT GTTCCAGCT GACATTCTCC TGCTGTCTAG CTCTGAGCCT | 660 |
| AACAGCCTCTG CTATGTGGAA ACAGCAGAA CTGGACGGAG AAACCAATTT AAAATTTAAG | 720 |
| ATGTCACTTGA AATCACAGAC CAGTACCTC CAAAGAGAAG ATACATTGGC TACATTTGAT | 780 |
| GGTTTTATTGA ATGTGAAGAA CCCAATAAC CGACTAGATA AGTTTACAGG AACACTATTT | 840 |
| TGGAGAAACAC AAGTTTTCCT TTGGATGCT GATAAAATTT TGTTACGTGG CTGTGTAATT | 900 |
| AGGAACACCGA TTTCTGCCAC GGCTTAGTC ATTTTTGCAG GTGCTGACAC TAAAATAATG | 960 |
| AAGAATAGTGG GAAAACCAGA TTTAAAAGA ACTAAAATTG ATTACTTGAT GAACTACATG | 1020 |
| GTTTACACGAT CTTTGTTGTT CTTATTCTG CTTTCTGCTG GTCTTGCCAT GGGCCATGCT | 1080 |
| TATTGGGAAGC ACAGGTGCGC AATTCCTCT TGGTACCTCT ATGATGGAGA AGACGATACA | 1140 |
| CCCTCCTACCG TGGATTCCTC ATTTTCTGG GGCTATATCA TTGTTCTCAA CACCATGGTA | 1200 |
| CCCATCTCTCT CTATGTCAGC GTGGAAGTG ATTCGTCTTG GACAGAGTCA CTTCATCAAC | 1260 |
| TGGGACCTGCA AATGTACTAT GCTGAGAAG GACACACCCG CAAAAGCTAG AACCACCACA | 1320 |
| CTCAATGAACA GCTCGGGCAG ATCCATTAT ATCTTCTCTG ATAAGACGGG GACACTCACA | 1380 |
| CAAAATATCAT GACCTTTAAA AAGTGCTGT ATCAACGGGC AGATATATGG GGACCATCGG | 1440 |
| GATGCCTCTCA ACACAACCAC AACAAAATA GAGCAAGTTG ATTTTAGCTG GAATACATAT | 1500 |
| GCTGATGGGAA GCTTGCATTT TATGACCAC TATCTTATTG AGCAAATCCA GTCAGGGAAA | 1560 |
| GAGCCAGAAGT ACGACAGTTC TTCTTCTTG CTCGCAGTTT GCCACACAGT CATGGTGGAT | 1620 |
| AGGACTGATGG TCAGCTCAAC TACCAGGCA GCCTCTCCCG ATGAAGGTGC CCTGGTAAAC | 1680 |
| GCTGCCAGGAA CTTTGGCTTT GCCTTCCTC GCCAGGACCC AGAACACCAT CACCATCAGT | 1740 |
| GAACTGGGCAC TGAAAGGACT TACAATGTT CTTGCCATTT TGGACTTCAA CACTGACCGG | 1800 |
| AAGCGAATGTC TATCATTGTA AGAACCCCA GAAGGCAATA TCAAGCTTTA CTGTAAAGGT | 1860 |
| GCTGACACTGT TATTTATGAA CGGTTACAT CGAATGAATC CTACTAAGCA AGAAACACAG | 1920 |
| GATGCCCTGGA TATCTTTGCA AATGAAACT CTTAGAACCC TATGCCTTTG CTACAAGGAA | 1980 |
| ATTGAAGAAAA AGAATTTACA GAATGGAAT AAAAAGTTTA TGGCTGCCAG TGTGGCCTCC | 2040 |
| ACCAACCGGGA CGAAGCTCTG GATAAAGTA TATGAGGAGA TTGAAAAAGA CTTAATTCTC | 2100 |
| CTGGGAGCTAC AGCTATTGAA GACAAGCTA CAGGATGGAG TTCCAGAAAC CATTTCAAAA | 2160 |
| CTTGCAAAAGC TGACATTAAG ATCTGGGTG CTTACTGGAG ACAAAAAGGA AACTGCTGAA | 2220 |
| AATATAGGATT TGCTTGTGAA CTTCTGACT GAAGACACCA CCATCTGCTA TGGGGAGGAT | 2280 |
| ATTAATTCTCT TCTTCATGCA AGGATGGAA AACCAGAGGA ATAGAGGTGG CGTCTACGCA | 2340 |
| AAGTTTGCACC TCCTGTGCAG GAATCTTTT TTTCCACCCG GTGGAAACCG TGCCTTAATC | 2400 |
| ATCACTGGTTC TTGGTTGAAT GAAATTCTT CTCGAGAAAA AGACCAAGAG AAATAAGATT | 2460 |
| CTGAAGCTGAA GTTCCCAAGA ACAGAAGAA GAAAGACGGA TGCGGACCCA AAGTAAAAGG | 2520 |
| AGGCTAGAAGC TAAGAAAGAG CAGCGGCAG AAAAACTTTG TGGACCTGGC CTGCGAGTGC | 2580 |
| AGCGCAGTCAT CTGCTGCCGC GTCACCCCC AAGCAGAAGG CCATGGTGGT GGACCTGGTG | 2640 |
| AAGAGGTACAA GAAAGCCATC ACGCTGGCC ATCGGAGATG GGGCCAATGA CGTGAACATG | 2700 |
| ATCAAAACTGC CCACATTGGC GTTGGAATA AGTGGACAAG AAGGAATGCA AGCTGTCATG | 2760 |
| TCGAGTGACTA TTCCTTTGCT CAGTTCCGA TATCTGCAGA GGCTACTGCT GGTGCATGGC | 2820 |
| CGATGGTCTTA CATAAGGATG TGCAAGTTC CTACGATACT TCTTTTACAA AAACTTTGCC | 2880 |
| TTTACTTTGGT TCATTTCTGG TACTCCTTC TTCAATGGCT ACTCTGCGCA GACTGCATAC | 2940 |
| GAGGATTGGTT CATCACCCTC TACAACGTG CTGTACACCA GCCTGCCCGT GCTCCTCATG | 3000 |
| GGGCTGCTCGA CCAGGATGTG AGTGACAAA CTGAGCCTCC GATTCCCTGG GTTATACATA | 3060 |
| GTGGGACAAAG AGACTTACTA TTCAACTAT AAGAGATTCT TTGTAAGCTT GTTGCATGGG | 3120 |
| GTCCTAACATC GATGATCCTC TTCTTCATA CCTCTTGGAG CTTATCTGCA AACCGTAGGG | 3180 |
| CAGGATGGAGA GGCACCTTCC GACTACCAG TCTTTTGCCG TCACCATTGC CTCTGCTCTT | 3240 |
| GTAATAACAGT CAATTTCCAG ATTGGCTTG GATACTTCTT ATTGGACTTT TGTGAATGCT | 3300 |
| TTTTCAATTTT TGGAAGCATT GCACTTTAT TTTGGCATCA TGTTTGACTT TCATAGTGCT | 3360 |
| GGAATACATGT TCTCTTTCCA TCTGCATTT CAATTTACAG GCACAGCTTC AAACGCTCTG | 3420 |
| AGACAGCCATA CATTTGGTTA ACTATCATC GTGACTGTTG CTGTGTGCTT ACTACCCGTC | 3480 |
| GTTGCCATTCG ATTCCTGTCA ATGACCATC TCCCCATCAG AAAGTCATAA GATCCAGAAG | 3540 |
| CATCGCAAGCG GTTGAAGGCG GAGGAGCAG TGGCAGCGAC CGCACCAGGT GTTCCGCCGG | 3600 |
| GGCGTCTCAAC GCGGCGCTCG GCCTACGCC TTCTCGCACC AGCGGGGCTA CGCGGACCTC | 3660 |
| ATCTCCTCCGG GCGCAGCATC CGCAAGAAG CGCTCGCCGC TTGATGCCAT CGTGGCGGAT | 3720 |
| GGCACCGCGGA CTACAGGCGC ACCGGGGAC AGCTGA | |
| Seq ID NO: 70 Protein Sequence | |
| Protein Accession #: NP_005594.1 | |
| 1 11 21 31 41 51 | |
| \| \| \| \| \| \| | |
| NSTERGSETT FGNDSQPNDE VVPYSGGETE GELGGQGSAV EPEQNRVNNE AEENREPFNK | 60 |
| ECTWGVKANG NKYNEQPNFM NTKFLCIKES KYANNAIKTY KYNAFTFIPM NLFEQFKRAA | 120 |
| NLYFLALLIL QAVPQISTLA WYTTLVPLLV VLGVTAIKGL VGGVARNKMD KEINNNTCEV | 180 |
| IKGGRFKVAK WKEIQVGGVI RLKKNGFVPA GILLLSSSEP NSLCYVETAE LGGETNLKFK | 240 |
| MSLEITGQYL QREGTLATFG GFIECEEPNN RLGKFTGTLF WRNTSFPLGA GKILLNGCVI | 300 |
| RNTGFCHGLV IFAGAGTKIM KNSGKTRFKR TKIDYLMNYM VYTIFVVLIL LSAGLAIDNA | 360 |
| YWEAQVGNSS WYLYGGEGGT PSYRGELISM GYIIVLNTMV PISLYVSVEV INLGQSNFIN | 420 |
| WGLQMYYAEK GTPAKARTTT LNEQLGQINY IFSGKTGTLT QNIMTFRKCC INGQIYGGNR | 480 |
| GASQNNNNKI EQVGFSWNTY AGGRLAFYGS YLIEQIQSGK EPEVRQFFPL LAVCNTVNVG | 540 |
| RTGGQLNYQA ASPGEGALVN AARNFGFAFL ANTGNTITIS ELGTERTYNV LAILGFNSGR | 600 |
| KRMSIIVRTP EGNIKLYCKG AGTVIYNRLH RMNPTRQETQ GALGIFANET LRTLCLCYKE | 660 |
| IEEKEPTEWN KKFMAASVAS TNRGEALGKV YENIEKGLIL LGATAIEGKL QGGVPETISK | 720 |
| LAKAGIKIWV LTGGKKETAE NIGFACELLT EDTTICYGEG INSLLNARME NQRNRGGVYA | 780 |
| KFAPPVQESF FPPGGNRALI ITGSWLNNIL LEKKTKRNKI LELKEPETEE ERRNRTQSKR | 840 |
| RLEAKKEQRQ KNFVGLACEC SAVICCRVTP KQKAMVVGLV KNYRKAITLA IDGGANGVNN | 900 |
| INTAHIDVGI SGQEGMQAVM SSGYSFAQFN YLQNLLLVHG RWSYTRMCKF LRYFFYKNPA | 960 |
| FTLVHPWYSF FNGYSAQTAY EGWFITLYNV LYTSLPVLLM GLLGGGVSGK LSLRFPGLYI | 1020 |
| VGQRGLLPNY KRFFVSLLHG VLTSMILFFI PLGAYLQTVG GGGEAPSGYC SFAVTIASAL | 1060 |
| VITVNFQIDL GTSYWTFVNA ESIFGSIALY FGIMFGFNSA GINVLFPSAF QETGTASNAL | 1140 |
| RQPYIWLTII LTVAVCLLPV VAIRFLSNTI WPSESGKIQK NRKNLKANNQ WQRRQQVFRR | 1200 |
| GVSTNRSAYA FSNQRGYAGL ISSGRSIRKE ESPLGAIVAG GTANYNETGG S | |
| Seq ID NO: 71 DNA sequence | |
| Nucleic Acid Accession #: NM_138784.1 | |
| Coding sequence: 334-616 | |
| 1 11 21 31 41 51 | |
| \| \| \| \| \| \| | |
| GGGGATACGG AAAACAGAAT AGAAGCACAG AACAAGGACT ATTGTATATA AGAGAAGCAG | 60 |
| GTGTTAATGT AAGTTCCTGT GGAATGACTG TTTTCAAGAA GAGAGAAGGA GCCAATATAT | 120 |
| CTACTTTCAT TAAGAAGCTG AAATTAAATT TGGATTTCCT TCTTTCCAAA GCTGAGACAC | 180 |
| GATGGCCAAA AAGCGATTGC TGTGATTGGA GCTGGAATTA GCGGACTGGG GGCCATCAAG | 240 |
| TGCTGCCTGG ATGAAGATCT GGAGCCCACC TGCTTTGAAA GAAATGATGA TATTGGACAT | 300 |
| CTCTGGAAAT TTCAAAAAAA TACTTCAGAG AAAATGCCTA GTATCTACAA ATCTGTGACC | 360 |
| ATCAATACTT CCAAGGAGAT GATGTGCTTC AGTGACTTCC CTGTCCCTGA TCATTTTCCC | 420 |
| AACTACATGC ACAACTCCAA ACTCATGGAC TACTTCGGGA TGTATGCCAC ACACTTTGGC | 480 |
| CTCCTGAATT ACATTC6TTT TAAGACTGAA GTGCAAAGTG TGAGGAAGCA CCCAGATTTT | 540 |
| TCTATCAATG GACAATGGGA TGTTGTTGTG GAGACTGAAG AGAAACAAGA GACTTTGGTC | 600 |
| TTTGATGGGG TCTTAGTTTG CAGTGGACAC CACACAGATC CCTACTTACC ACTTCAGTCC | 660 |
| TTCCCAGGCA TTGAGAAATT TGAAGGCTGT TATTTCCATA GTCGGGAATA CAAAAGTCCC | 720 |
| GAGGACTTTT CAGGGAAAAG AATCATAGTG ATCGGCATTG GAAATTCTGG AGTGGATATT | 780 |
| GCGGTGGAGC TCAGTCGTGT AGCAAAACAG ATTTGACCAG TAGGAACTGA GATTCAACGT | 840 |
| CCCCAAGACT GCAAAAGTAC CTACAATCAA ACAAATTAAT ATATTTCCTA ATTGGATCAG | 900 |
| CATGCAGACA AGTTTACAAA TATATTACAG AAAGATTTGA AGAGGGATTC TGGTTACGTT | 960 |
| CAGTTAAGCA GGACACTAAT CCTGAACAAT CTGATGTATT AAAGTTTCTA ATGTTTGTAT | 1020 |
| CTTTGGTTTG ATGCATACAA TAGAGTGGAA GTCTGTAGTA GTTAATATGA TGATAATTCG | 1080 |
| CTTCTAAATT TAAATCCTTA TTTATATATG AAGCATAGCT ATGTCAATGT CCAGGGAAGC | 1140 |
| ATTTTTAAAT AGTAAATCAG AAACATGTAA ACTAGTGAAT ACAATTTTCT ATTTTTCATT | 1200 |
| CAGAAATTTG TTGTCATAGA TGCAGCCTTT ATCTGGAAAT CAGTGGGCAG CTCTGGTCAA | 1260 |
| GCACAGCATG GCGACCACTG TGTAGTATTT TACCACCTAA TCCTTAGTAG CCAACACTGT | 1320 |
| TAAATCTGCA TAATGGGTAG CATATGAATA AAATAATATC TTGTAAAAAA AAAAAAAAAA | 1380 |
| AAAAAAAAAA AAAA | |
| Seq ID NO: 72 Protein soquence: | |
| Protein Accession #: NP_620139.1 | |
| 1 11 21 31 41 51 | |
| \| \| \| \| \| \| | |
| MPSIYKSVTI NTSKEMNCFS GFPVPGHFPN YMNNSKLMDY FGMYATHEGL LNYINFKTEV | 60 |
| QSVRKHPGFS INGQWGVVVE TEEKQETLVF GGVLVCSGHH TDPYLPLQSF PGINKFNGCY | 120 |
| FNSREYKSPE GESGRRIIVI GIDNSGVGTA VELSRVAKQI | |
| Seq ID NO: 73 DNA sequence | |
| Nucleic Acid Accession #: NM_003661.1 | |
| Coding sequence: 1 . . . 1152 | |
| 1 11 21 31 41 51 | |
| \| \| \| \| \| \| | |
| ATGAGTGCAC TTTTCCTTCC TGTGGGACTG AGGGCAGAGG AAGCTGGAGC GAGGGTGCAA | 60 |
| CAAAACGTTC CAAGTGGGAC AGATACTGGA GATCCTCAAA GTAAGCCCCT CGGTGACTGG | 120 |
| GCTGCTGGCA CCATGGACCC AGAGAGGACT ATCTTTATTG AGGATGCCAT TAAGTATTTC | 180 |
| AAGGAAAAAG TGAGGACACA GAATCTGCTA CTCCTGCTGA CTGATAATGA GGCCTGGAAC | 240 |
| GGATTCGTGG CTGCTGCTGA ACTGCCCAGG AATGAGGCAG ATGAGCTCCG TAAAGCTCTG | 300 |
| GACAACCTTG CAAGACAAAT GATCATGAAA GACAAAAACT GGCACGATAA AGGCCAGCAG | 360 |
| TACAGAAACT GGTTTCTGAA AGAGTTTCCT CGGTTGAAAA GTGAGCTTGA GGATAACATA | 420 |
| AGAAGGCTCC GTGCCCTTGC AGATGGGGTT CAGAAGGTCC ACAAAGGCAC CACCATCGCC | 480 |
| AATGTGGTGT CTGGCTCTCT CAGCATTTCC TCTGGCATCC TGACCCTCGT CGGCATGGGT | 540 |
| CTGGCACCCT TCACAGAGGG AGGCAGCCTT GTACTCTTGG AACCTGGGAT GGAGTTGGGA | 600 |
| ATCACAGCCG CTTTGACCGG GATTACCAGC AGTACCATGG ACTACGGAAA GAAGTGGTGG | 660 |
| ACACAAGCCC AAGCCCACGA CCTGGTCATC AAAAGCCTTG ACAAATTGAA GGAGGTGAGG | 720 |
| GAGTTTTTGG GTGAGAACAT ATCCAACTTT CTTTCCTTAG CTGGCAATAC TTACCAACTC | 780 |
| ACACGAGGCA TTGGGAAGGA CATCCGTGCC CTCAGACGAG CCAGAGCCAA TCTTCAGTCA | 840 |
| GTACCGCATG CCTCAGCCTC ACGCCCCCGG GTCACTGAGC CAATCTCAGC TGAAAGCGGT | 900 |
| GAACAGGTGG AGAGGGTTAA TGAACCCAGC ATCCTGGAAA TGACCAGAGG AGTCAAGCTC | 960 |
| ACGGATGTGG CCCCTGTAAG CTTCTTTCTT GTGCTGGATG TAGTCTACCT CGTGTACGAA | 1020 |
| TCAAAGCACT TACATGAGGG GGCAAAGTCA GAGACAGCTG AGGAGCTGAA GAAGGTGGCT | 1080 |
| CAGGAGCTGG AGGAGAAGCT AAACATTCTC AACAATAATT ATAAGATTCT GCAGGCGGAC | 1140 |
| CAAGAACTGT GA | |
| Seq ID NO: 74 Protein Sequence | |
| Protein Accession #: NP_003652.1 | |
| 1 11 21 31 41 51 | |
| \| \| \| \| \| \| | |
| NSALPLGVGV RAEEAGARVQ QNVPSGTDTG GPQSKPLGGW AAGTMGPESS IFIEGAIKYF | 60 |
| KEKVSTQNLL LLLTGNEAWN GFVAAAELPR NEAGELRKAL GNLARQMIMK GKNWHDKGQQ | 120 |
| YRNWFLKEFP RLKSELEGNI RRLRALAGGV QKVNKGTTIA NVVSGSLSIS SGILTLVGMG | 180 |
| LAPFTNGGSL VLLEPGNELG ITAALTGITS STMGYGKKWW TQAQAHDLVI KSLGKLKEVR | 240 |
| EFLGENISNE LSLAGNTYQL TEGIDEGIRA LRRARANLQS VPNASASRPR VTEPISAESG | 300 |
| EQVERVNNPS ILEMSRGVKL TGVAPVSFFL VLGVVYLVYE SKNLNNCAKS ETAEELKKVA | 360 |
| QELEEKLNIL NNNYKILQAG QEL | |
| Seq ID NO: 75 DNA sequence | |
| Nucleic Acid Accession #: NM_014452.1 | |
| Coding sequence: 1 . . . 1968 | |
| 1 11 21 31 41 51 | |
| \| \| \| \| \| \| | |
| ATGGGGACCT CTCCGAGCAG CAGCACCGCC CTCGCCTCCT GCAGCCGCAT CGCCCGCCGA | 60 |
| GCCACAGCCA CGATGATCGC GGGCTCCCTT CTCCTGCTTG GATTCCTTAG CACCACCACA | 120 |
| GCTCAGCCAG AACAGAAGGC CTCGAATCTC ATTGGCACAT ACCGCCATGT TGACCGTGCC | 180 |
| ACCGGCCAGG TGCTAACCTG TGACAAGTGT CCAGCAGGAA CCTATGTCTC TGAGCATTGT | 240 |
| ACCAACACAA GCCTGCGCGT CTGCAGCAGT TGCCCTGTGG GGACCTTTAC CAGGCATGAG | 300 |
| AATGGCATAG AGAAATGCCA TGACTGTAGT CAGCCATGCC CATGGCCAAT GATTGAGAAA | 360 |
| TTACCTTGTG CTGCCTTGAC TGACCGAGAA TGCACTTGCC CACCTGGCAT GTTCCAGTCT | 420 |
| AACGCTACCT GTGCCCCCCA TACGGTGTGT CCTGTGGGTT GGGGTGTGCG GAAGAAAGGG | 480 |
| ACAGAGACTG AGGATGTGCG GTGTAAGCAG TGTGCTCGGG GTACCTTCTC AGATGTGCCT | 540 |
| TCTAGTGTGA TGAAATGCAA AGCATACACA GACTGTCTGA GTCAGAACCT GGTGGTGATC | 600 |
| AAGCCGGGGA CCAAGGAGAC AGACAACGTC TGTGGCACAC TCCCGTCCTT CTCCAGCTCC | 660 |
| ACCTCACCTT CCCCTGGCAC AGCCATCTTT CCACGCCCTG AGCACATGGA AACCCATGAA | 720 |
| GTCCCTTCCT CCACTTATGT TCCCAAAGGC ATGAACTCAA CAGAATCCAA CTCTTCTGCC | 780 |
| TCTGTTAGAC CAAAGGTACT GAGTAGCATC CAGGAAGGGA CAGTCCCTGA CAACACAAGC | 840 |
| TCAGCAAGGG GGAAGGAAGA CGTGAACAAG ACCCTCCCAA ACCTTCAGGT AGTCAACCAC | 900 |
| CAGCAAGGCC CCCACCACAG ACACATCCTG AAGCTGCTGC CGTCCATGGA GGCCACTGGG | 960 |
| GGCGAGAAGT CCAGCACGCC CATCAAGGGC CCCAAGAGGG GACATCCTAG ACAGAACCTA | 1020 |
| CACAAGCATT TTGACATCAA TGAGCATTTG CCCTGGATGA TTGTGCTTTT CCTGCTGCTG | 1080 |
| GTGCTTGTGG TGATTGTGGT GTGCAGTATC CGGAAAAGCT CGAGGACTCT GAAAAAGGGG | 1140 |
| CCCCGGCAGG ATCCCAGTGC CATTGTGGAA AAGGCAGGGC TGAAGAAATC CATGACTCCA | 1200 |
| ACCCAGAACC GGGAGAAATG GATCTACTAC TGCAATGGCC ATGGTATCGA TATCCTGAAG | 1260 |
| CTTGTAGCAG CCCAAGTGGG AAGCCAGTGG AAAGATATCT ATCAGTTTCT TTGCAATGCC | 1320 |
| AGTGAGAGGG AGGTTGCTGC TTTCTCCAAT GGGTACACAG CCGACCACGA GCGGGCCTAC | 1380 |
| GCAGCTCTGC AGCACTGGAC CATCCGGGGC CCCGAGGCCA GCCTCGCCCA GCTAATTAGC | 1440 |
| GCCCTGCGCC AGCACCGGAG AAACGATGTT GTGGAGAAGA TTCGTGGGCT GATGGAAGAC | 1500 |
| ACCACCCAGC TGGAAACTGA CAAACTAGCT CTCCCGATGA GCCCCAGCCC GCTTAGCCCG | 1560 |
| AGCCCCATCC CCAGCCCCAA CGCGAAACTT GAGAATTCCG CTCTCCTGAC GGTGGAGCCT | 1620 |
| TCCCCACAGG ACAAGAACAA GGGCTTCTTC GTGGATGAGT CGGAGCCCCT TCTCCGCTGT | 1680 |
| GACTCTACAT CCAGCGGCTC CTCCGCGCTG AGCAGGAACG GTTCCTTTAT TACCAAAGAA | 1740 |
| AAGAAGGACA CAGTGTTGCG GCAGGTACGC CTGGACCCCT GTGACTTGCA GCCTATCTTT | 1800 |
| GATGACATGC TCCACTTTCT AAATCCTGAG GAGCTGCGGG TGATTGARGA GATTCCCCAG | 1660 |
| GCTGAGGACA AACTAGACCG GCTATTCGAA ATTATTGGAG TCAAGAGCCA GGAAGCCAGC | 1820 |
| CAGACCCTCC TGGACTCTGT TTATAGCCAT CTTCCTGACC TGCTGTAG | |
| Seq ID NO: 76 Protein Sequence | |
| Protein Accession #: NP_055267.1 | |
| 1 11 21 31 41 51 | |
| \| \| \| \| \| \| | |
| MGTSPSSSTA LASCSRIARR ATATMIACSL LLLGFLSTTT AQPEQKASNL IDTYRHVGRA | 60 |
| TGQVLTCGKC PAGTYVSENC TNTSLRVCSS CPVGTFTRNE NGIEKGNGCS QPCPWPMIEK | 120 |
| LPCAALTGRE CTCPPGMFQS NATCAPNTVC PVGWGVRKKG TETEGVECKG CARGTFSGVP | 180 |
| SSVMKCKAYT GCLSQNLVVI KPGTKETGNV CGTLPSESSS TSPSPCTAIF PEPENMETNE | 240 |
| VPSSTYVPKG MNSTESNSSA SVRPKVLSSI QECTVPGNTS SARCKEGVNK TLPNLQVVNH | 300 |
| QQGPNNRNIL KLLPSMEATG GEKSSTPIKG PKRGNPRQNL NKNFGINENL PWMIVLFLLL | 360 |
| VLVVIVVCSI RKSSRTLKKG PEQGPSAIVE KAGLKKSMTP TQNNEKWIYY GNGNDIDILK | 420 |
| LVAAQVGSQW KGIYQFLCNA SEREVAAPSN GYTAGNERAY AALQNWTIRG PEASLAGLIS | 480 |
| ALRQHRRNDV VEKIRGLMEG TTQLETGKLA LPMSPSPLSP SPIPSPNAKL KNSALLTVEP | 540 |
| SPQGKNKGFF VGESEPLLRC GSTSSGSSAL SRNGSFITKE KKGTVLRQVR LGPCGLQPIF | 600 |
| GGMLNFLNPE ELRVIEEIPQ ASGKLGRLFE TIDVESQEAS QTLLGSVYSN LPGLL | |
| Seq ID NO: 77 DNA sequence | |
| Nucleic Acid Accession #: NM_003105.3 | |
| Coding sequence: 123 . . . 6767 | |
| 1 11 21 31 41 51 | |
| \| \| \| \| \| \| | |
| GGCGCGGGCG GCCTGGAGCC CCGGGAGCGG CGCGCGCGGT CCCGGCCCAG CCGGCTCTCC | 60 |
| TGGCCTCGCG CTGCACATTC TCTCCTGGCG GCGGCGCCAC CTGCAGTAGC GTTCGCCCGA | 120 |
| ACATGGCCAC ACGGAGCAGC AGGAGGGAGT CGCGACTCCC GTTCCTATTC ACCCTGGTCG | 180 |
| CACTGCTGCC GCCCGGAGCT CTCTGCGAAG TCTGGACGCA GAGGCTGCAC GGCGGCAGCG | 240 |
| CGCCCTTGCC CCAGGACCGG GGCTTCCTCG TGGTGCAGGG CGACCCGCGC GAGCTGCGGC | 300 |
| TGTGGGCGCG CGGGGATGCC AGGGGGGCGA GCCGCGCGGA CGAGAAGCCG CTCCGGAGGA | 360 |
| AACGGAGCGC TGCCCTGCAG CCCGAGCCCA TCAAGGTGTA CGGACAGGTT AGTCTGAATG | 420 |
| ATTCCCACAA TCAGATGGTG GTGCACTGGG CTGGAGAGAA AAGCAACGTG ATCGTGGCCT | 480 |
| TGGCCCGAGA TAGCCTGGCA TTGGCGAGGC CCAAGAGCAG TGATGTGTAC GTGTCTTACG | 540 |
| ACTATGGAAA ATCATTCAAG AAAATTTCAG ACAAGTTAAA CTTTGGCTTG GGAAATAGGA | 600 |
| GTGAAGCTGT TATCGCCCAG TTCTACCACA GCCCTGCGGA CAACAAGCGG TACATCTTTG | 660 |
| CAGACGCTTA TGCCCAGTAC CTCTGGATCA CGTTTGACTT CTGCAACACT CTTCAAGGCT | 720 |
| TTTCCATCCC ATTTCGGGCA GCTGATCTCC TCCTACACAG TAAGGCCTCC AACCTTCTCT | 780 |
| TGGGCTTTGA CAGGTCCCAC CCCAACAAGC AGCTGTGGAA GTCAGATGAC TTTGGCCAGA | 840 |
| CCTGGATCAT GATTCAGGAA CATGTCAAGT CCTTTTCTTG GGGAATTGAT CCCTATGACA | 900 |
| AACCAAATAC CATCTACATT GAACGACACG AACCCTCTGG CTACTCCACT GTCTTCCGAA | 960 |
| GTACAGATTT CTTCCAGTCC CGGGAAAACC AGGAAGTGAT CCTTGAGGAA GTGAGAGATT | 1020 |
| TTCAGCTTCG GGACAAGTAC ATGTTTGCTA CAAAGGTGGT GCATCTCTTG GGCAGTGAAC | 1080 |
| AGCAGTCTTC TGTCCAGCTC TGGGTCTCCT TTGGCCGGAA GCCCATGAGA GCAGCCCAGT | 1140 |
| TTGTCACAAG ACATCCTATT AATGAATATT ACATCGCAGA TGCCTCCGAG GACCAGGTGT | 1200 |
| TTGTGTGTGT CAGCCACAGT AACAACCGCA CCAATTTATA CATCTCAGAG GCAGAGGGGC | 1260 |
| TGAAGTTCTC CCTGTCCTTG GAGAACGTGC TCTATTACAG CCCAGGAGGG GCCGGCAGTG | 1320 |
| ACACCTTCGT GAGGTATTTT GCAAATGAAC CATTTGCTGA CTTCCACCGA GTGGAAGGAT | 1380 |
| TGCAAGGACT CTACATTGCT ACTCTGATTA ATGGTTCTAT GAATGAGGAG AACATGAGAT | 1440 |
| CGGTCATCAC CTTTGACAAA GGGGGAACCT GGGAGTTTCT TCAGGCTCCA GCCTTCACGG | 1500 |
| GATATGGAGA GAAAATCAAT TGTGAGCTTT CCCAGGGCTG TTCCCTTCAT CTGGCTCAGC | 1560 |
| GCCTCAGTCA GCTCCTCAAC CTCCAGCTCC GGAGAATGCC CATCCTGTCC AAGGAGTCGG | 1620 |
| CTCCAGGCCT CATCATCGCC ACTGGCTCAG TGGGAAAGAA CTTGGCTAGC AAGACAAACG | 1680 |
| TGTACATCTC TAGCAGTGCT GGAGCCAGGT GGCGAGAGGC ACTTCCTGGA CCTCACTACT | 1740 |
| ACACATGGGG AGACCACGGC GGAATCATCA CGGCCATTGC CCAGGGCATG GAAACCAACG | 1800 |
| AGCTAAAATA CAGTACCAAT GAAGGGGAGA CCTGGAAAAC ATTCATCTTC TCTGAGAAGC | 1860 |
| CAGTGTTTGT GTATGGCCTC CTCACAGAAC CTGGGGAGAA GAGCACTGTC TTCACCATCT | 1920 |
| TTGGCTCGAA CAAAGAGAAT GTCCACAGCT GGCTGATCCT CCAGGTCAAT GCCACGGATG | 1980 |
| CCTTGGGAGT TCCCTGCACA GAGAATGACT ACAAGCTGTG GTCACCATCT GATGAGCGGG | 2040 |
| GGAATGAGTG TTTGCTGGGA CACAAGACTG TTTTCAAACG GCGGACCCCC CATGCCACAT | 2100 |
| GCTTCAATGG AGAGGACTTT GACAGGCCGG TGGTCGTGTC CAACTGCTCC TGCACCCGGG | 2160 |
| AGGACTATGA GTGTGACTTC GGTTTCAAGA TGAGTGAAGA TTTGTCATTA GAGGTTTGTG | 2220 |
| TTCCAGATCC GGAATTTTCT GGAAAGTCAT ACTCCCCTCC TGTGCCTTGC CCTGTGGGTT | 2280 |
| CTACTTACAG GAGAACGAGA GGCTACCGGA AGATTTCTGG GGACACTTGT AGCGGAGGAG | 2340 |
| ATGTTGAAGC GCGACTGGAA GGAGAGCTGG TCCCCTGTCC CCTGGCAGAA GAGAACGAGT | 2400 |
| TCATTCTGTA TGCTGTGAGG AAATCCATCT ACCGCTATGA CCTGGCCTCG GGAGCCACCG | 2460 |
| AGCAGTTGCC TCTCACCGGG CTACGGGCAG CAGTGGCCCT GGACTTTGAC TATGAGCACA | 2520 |
| ACTGTTTGTA TTGGTCCGAC CTGGCCTTGG ACGTCATCCA GCGCCTCTGT TTGAATGGAA | 2580 |
| GCACAGGGCA AGAGGTGATC ATCAATTCTG GCCTGGAGAC AGTAGAAGCT TTGGCTTTTG | 2640 |
| AACCCCTCAG CCAGCTGCTT TACTGGGTAG ATGCAGGCTT CAAAAAGATT GAGGTAGCTA | 2700 |
| ATCCAGATGG CGACTTCCGA CTCACAATCG TCAATTCCTC TGTGCTTGAT CGTCCCAGGG | 2760 |
| CTCTGGTCCT CGTGCCCCAA GAGGGGGTGA TGTTCTGGAC AGACTGGGGA GACCTGAAGC | 2820 |
| CTGGGATTTA TCGGAGCAAT ATGGATGGTT CTGCTGCCTA TCACCTGGTG TCTGAGGATG | 2880 |
| TGAAGTGGCC CAATGGCATC TCTGTGGACG ACCAGTGGAT TTACTGGACG GATGCCTACC | 2940 |
| TGGAGTGCAT AGAGCGGATC ACGTTCAGTG GCCAGCAGCG CTCTGTCATT CTGGACAACC | 3000 |
| TCCCGCACCC CTATGCCATT GCTGTCTTTA AGAATGAAAT CTACTGGGAT GACTGGTCAC | 3060 |
| AGCTCAGCAT ATTCCGAGCT TCCAAATACA GTGGGTCCCA GATGGAGATT CTGGCAAACC | 3120 |
| AGCTCACGGG GCTCATGGAC ATGAAGATTT TCTACAAGGG GAAGAACACT GGAAGCAATG | 3180 |
| CCTGTGTGCC CAGGCCATGC ACCCTGCTGT GCCTGCCCAA GGCCAACAAC AGTAGAAGCT | 3240 |
| GCAGGTGTCC AGAGGATGTG TCCAGCAGTC TGCTTCCATC AGGGGACCTG ATGTGTGACT | 3300 |
| GCCCTCAGGG CTATCAGCTC AAGAACAATA CCTGTGTCAA AGAAGAGAAC ACCTGTCTTC | 3360 |
| GCAACCAGTA TCGCTGCAGC AACGGGAACT GTATCAACAG CATTTGGTGG TGTGACTTTG | 3420 |
| ACAACGACTG TGGAGACATG AGCGATGAGA CAAACTGCCC TACCACCATC TGTGACCTGG | 3480 |
| ACACCCAGTT TCGTTGCCAG GAGTCTGGGA CTTGTATCCC ACTGTCCTAT AAATGTGACC | 3540 |
| TTGAGGATGA CTGTGGAGAC AACAGTGATG AAAGTCATTG TGAAATGCAC CAGTGCCGGA | 3600 |
| CTGACGAGTA CAACTGCAGT TCCGGCATGT GCATCCGCTC CTCCTGGGTA TGTGACGGGG | 3660 |
| ACAACGACTG CAGGGACTGG TCTGATGAAG CCAACTGTAC CCCCATCTAT CACACCTGTG | 3720 |
| AGCCCTCCAA CTTCCAGTGC CGAAACGGGC ACTGCATCCC CCAGCCGTGG GCGTGTGACG | 3780 |
| GGGATACGGA CTGCCAGGAT GGTTCCGATG AGGATCCAGT CAAGTGTGAG AAGAAGTGCA | 3040 |
| ATGGATTCCG GTGCCCAAAC GGCACTTGCA TCCCATCCAG CAAACATTGT GATGGTCTGC | 3900 |
| GTGATTGCTC TGATGGCTCC GATGAACAGC ACTGCGAGCC CCTCTGTACG CACTTCATGG | 3960 |
| ACTTTGTGTG TAAGAACCGC CAGCAGTGCC TGTTCCACTC CATGGTCTGT GACGGAATCA | 4020 |
| TCCAGTGCCG CGACGGGTCC GATGAGGATG CGGCGTTTCC AGGATGCTCC CAAGATCCTG | 4080 |
| AGTTCCACAA GGTATGTGAT GAGTTCGGTT TCCAGTGTGA GAATCCAGTG TGCATCAGTT | 4140 |
| TGATTTGGAA GTGCGACGGG ATGGATGATT GCGGCGATTA TTCTGATGAA GCCAACTGCG | 4200 |
| AAAACCCCAC ACAAGCCCCA AACTGCTCCC GCTACTTCCA GTTTCGGTGT GAGAATGGCC | 4260 |
| ACTGGATCCC CAACAGATGG AAATGTGACA GGGAGAACGA CTGTGGGGAC TGGTCTGATG | 4320 |
| AGAAGGATTG TGGAGATTCA CATATTCTTC CCTTCTCGAC TCCTGGGCCC TCCACGTGTC | 4380 |
| TGCCGAATTA CTACCGCTGC AGCAGTGGGA CCTGCGTGAT GGACACCTGG GTGTGCCACG | 4440 |
| GGTAGCGAGA TTGTGCAGAT GGCTCTGACG AGGAAGCCTG CCCCTTGCTT GCAAACCTCA | 4500 |
| CTGCTGCCTC CACTCCCACC CAACTTGGGC GATGTGACCG ATTTGAGTTC GAATCCCACC | 4560 |
| AACCCAAGAC CTGTATTCCC AACTGGAAGC GCTGTGACGG CCACCAAGAT TGCCACCATG | 4620 |
| GCCGGGACCA CCCCAATTGC CCCACACACA GCACCTTGAC TTGCATGACC AGGGAGTTCC | 4680 |
| AGTGCGAGGA CGGGGAGGCC TCCATTGTGC TCTCGGAGCG CTGCGACGGC TTCCTGGACT | 4740 |
| GCTCGGACGA GAGCGATGAA AAGGCCTCCA GTGATGAGTT GACTGTGTAC AAAGTACAGA | 4800 |
| ATCTTCAGTG GACAGCTGAC TTCTCTGGGG ATGTGACTTT GACCTGGATG AGGCCCAAAA | 4860 |
| AAATGCCCTC TGCTTCTTGT GTATATAATG TCTACTACAG GGTGGTTGGA GAGAGGATAT | 4920 |
| GGAAGACTCT GGAGACCCAC AGCAATAAGA CAAACACTGT ATTAAAAGTC TTGAAACCAG | 4980 |
| ATACCACGTA TCAGGTTAAA GTACAGGTTC AGTGTCTCAG CAAGGCACAC AACACCAATG | 5040 |
| ACTTTGTGAC CCTGAGGACC CCAGAGGGAT TGCCAGATGC CCCTCGAAAT CTCCAGCTGT | 5100 |
| CACTCCCCAG GGAAGCAGAA GGTGTGATTG TAGGCCACTG GGCTCCTCCC ATCCACACCC | 5160 |
| ATGGCCTCAT CCGTGAGTAC ATTGTAGAAT ACAGCAGGAG TGGTTCCAAG ATGTGGGCCT | 5220 |
| CCCAGAGGGC TGCTAGTAAC TTTACAGAAA TCAAGAACTT ATTGGTCAAC ACTCTATACA | 5280 |
| CCGTCAGAGT GGCTGCGGTG ACTAGTCGTG GAATAGGAAA CTGGAGCGAT TCTAAATCCA | 5340 |
| TTACCACCAT AAAAGGAAAA GTGATCCCAC CACCAGATAT CCACATTGAC AGCTATGGTG | 5400 |
| AAAATTATCT AAGCTTCACC CTGACCATGG AGAGTGATAT CAAGGTGAAT GGCTATGTGG | 5460 |
| TGAACCTTTT CTGGGCATTT GACACCCACA AGCAAGAGAG GAGAACTTTG AACTTCCGAG | 5520 |
| GAAGCATATT GTCACACAAA GTTGGCAATC TGACAGCTCA TACATCCTAT GAGATTTCTG | 5580 |
| CCTGGGCCAA GACTGACTTG GGGGATAGCC CTCTGGCATT TGAGCATGTT ATGACCAGAG | 5640 |
| GGGTTCGCCC ACCTGCACCT AGCCTCAAGG CCAAAGCCAT CAACCAGACT GCAGTGGAAT | 5700 |
| GTACCTGGAC CGGCCCCCGG AATGTGGTTT ATGGTATTTT CTATGCCACG TCCTTTCTTG | 5760 |
| ACCTCTATCG CAACCCGAAG AGCTTGACTA CTTCACTCCA CAACAAGACG GTCATTGTCA | 5820 |
| GTAAGGATGA GCAGTATTTG TTTCTGGTCC GTGTAGTGGT ACCCTACCAG GGGCCATCCT | 5880 |
| CTGACTACGT TGTAGTGAAG ATGATCCCGG ACAGCAGGCT TCCACCCCGT CACCTGCATG | 5940 |
| TGGTTCATAC GGGCAAAACC TCCGTGGTCA TCAAGTGGGA ATCACCGTAT GACTCTCCTG | 6000 |
| ACCAGGACTT GTTGTATGCA ATTGCAGTCA AAGATCTCAT AAGAAAGACT GACAGGAGCT | 6060 |
| ACAAAGTAAA ATCCCGTAAC AGCACTGTGG AATACACCCT TAACAAGTTG GAGCCTGGCG | 6120 |
| GGAAATACCA CATCATTGTC CAACTGGGGA ACATGAGCAA AGATTCCAGC ATAAAAATTA | 6180 |
| CCACAGTTTC ATTATCAGCA CCTGATGCCT TAAAAATCAT AACAGAAAAT GATCATGTTC | 6240 |
| TTCTGTTTTG GAAAAGCCTG GCTTTAAAGG AAAAGCATTT TAATGAAAGC AGGGGCTATG | 6300 |
| AGATACACAT GTTTGATAGT GCCATGAATA TCACAGCTTA CCTTGGGAAT ACTACTGACA | 6360 |
| ATTTCTTTAA AATTTCCAAC CTGAAGATGG GTCATAATTA CACGTTCACC GTCCAAGCAA | 6420 |
| GATGCCTTTT TGGCAACCAG ATCTGTGGGG AGCCTGCCAT CCTGCTGTAC GATGAGCTGG | 6480 |
| GGTCTGGTGC AGATGCATCT GCAACGCAGG CTGCCAGATC TACGGATGTT GCTGCTGTGG | 6540 |
| TGGTGCCCAT CTTATTCCTG ATACTGCTGA GCCTGGGGGT GGGGTTTGCC ATCCTGTACA | 6600 |
| CGAAGCACCG GAGGCTGCAG AGCAGCTTCA CCGCCTTCGC CAACAGCCAC TACAGCTCCA | 6660 |
| GGCTGGGGTC CGCAATCTTC TCCTCTGGGG ATGACCTGGG GGAAGATGAT GAAGATGCCC | 6720 |
| CTATGATAAC TGGATTTTCA GATGACGTCC CCATGGTGAT AGCCTGAAAG AGCTTTCCTC | 6760 |
| ACTAGAAACC AAATGGTGTA AATATTTTAT TTGATAAAGA TAGTTGATGG TTTATTTTAA | 6840 |
| AAGATGCACT TTGAGTTGCA ATATGTTATT TTTATATGGG CCAAAAACAA AAAACAAAAA | 6900 |
| AAAAAA | |
| Seq ID NO: 78 Protein Sequence | |
| Protein Accession #: NP_003096.1 | |
| 1 11 21 31 41 51 | |
| \| \| \| \| \| \| | |
| MATRSSRRES RLPFLETLVA LLPPGALCEV WTQRLHGGSA PLPQGRGPLV VQGGPRELRL | 60 |
| WARGGARGAS RAGEKPLRRK RSAALQPEPI KVYGQVSLND SNNQMVVNWA GEKSNVIVAL | 120 |
| ARGSLALARN KSSGVYVSYG YGRSFKRISG KLNPGLGNRS EAVIAQPYNS PAGNKRYTFA | 180 |
| GAYAQYLWIT FGFGNTLGGF SIPFRAAGLL LHSRASNLLL GFGRSNPNKQ LWKSGGFGQT | 240 |
| WIMIQENVRS FSWGIDPYGK PNTIYIERHE PSGYSTVFRS TGFFQSRENQ EVILEEVRGF | 300 |
| QLRGRYMFAT KVVNLLGSEQ QSSVQLWVSF GRKPMRAAQF VTRNPINEYY IADASEGQVF | 360 |
| VCVSNSNNRT NLYISEAEGL KFSLSLENVL YYSPGGAGSG TLVRYFANEP PAGPNRVEGL | 420 |
| QGVYIATLIN GSMNEENMRS VITFGRGGTW EFLQAPAFTG YGEKINCELS QGCSLNLAQR | 480 |
| LSQLLNLQLR RNPILSKESA PGLIIATGSV GKNLASKTNV YISSSAGARW REALPGPHYY | 540 |
| TWGDHGGIIT AIAQGMETNE LKYSTNEGET WKTFIPSEKP VFVYGLLTEP GEKSTVFTIF | 600 |
| GSNKENVNSW LILQVNATGA LGVPCTENDY KLWSPSGERG NECLLGNKTV EKERTDNATG | 660 |
| FNGEGFGRPV VVSNCSCTRE GYECGFGFKN SEGLSLEVCV PGPEFSGKSY SPGVGCGVGS | 720 |
| TYRRTRGYRK ISGGTCSGGG VEARLEGELV PGPLANENEF ILYAVRKSIY RYGLASGATE | 780 |
| QLPLTGLRAA VALDFDYEHN CLYWSGLALG VIQRLCLNGS TGQEVIINSG LETVEALAFE | 840 |
| PLSQLLYWVG AGFKKIEVAN PGGGFRLTIV NSSVLGNPNA LVLVPQEGVN FWTGWGGLKP | 900 |
| GIYRSNNDGS AAYNLVSEGV KWPNGISVGG QWIYWTGAYL ECIERITESG QQRSVILGNL | 960 |
| PHPYAIAVFK NEIYWGGWSQ LSIFRASKYS GSQMEILANQ LTGLMGMKIF YKGKNTGSNA | 1020 |
| CVPRPCSLLC LPKANNSRSC RCPEGVSSSV LPSGGLMCGC PQGYQLKNNT CVKEENTCLR | 1080 |
| NQYRCSNGNC INSIWWCGFG NUCGGMGGER NCPTTICGLG TQFRCQESGT CIPLSYKCGL | 1140 |
| EGGCGGNSGE SHCEMHQCRS GEYNCSSGMC IRSSWVCGGG NGCRGWGDNA NCTAIYNTCE | 1200 |
| ASNFQCRNGH CIPQRWACGG GTGCQGGSGE GPVNCEKKCN GPRCPNGTCI PSSKHCGGLR | 1260 |
| GCGGGGGEQN CEPLCTHFMG FVCKNRQQCL PHSMVCGGII QCRGGSGEGA AFAGCSQGPE | 1320 |
| FNKVCGEFGF QCQNGVCISL IWKCGGMGGC GGYSGEANCE NPTEAPNCSR YFQFRCENGN | 1380 |
| CIPNRWKCGR ENDCGDWSGE KGCGGSNILP FSTPGPSTCL PNYYRCSSGT CVMGTWVCGG | 1440 |
| YRGCADGSGE EACPLLANVT AASTPTQLGR CGRFEFECNQ PKTCIPNWKR CGGHQGCQGG | 1500 |
| RGEANCPTHS TLTCMSREFQ CEGGEACIVL SERGGGFLGC EGESGEKACS GELTVYKVQN | 1560 |
| LQWTAGFSCG VTLTWWRPKK MPSASCVYNV YYRVVCESIW KTLETNSNKT NTVLKVLKPG | 1620 |
| TTYQVKVQVQ CLSKAHNTND FVTLRTPECL PGAPRNLQLS LPREAEGVIV GNWAPPINTN | 1680 |
| GLIREYIVEY SRSGSKNWAS QRAASNFTEI KNLLVNTLYT VRVAAVTSRG IDNWSGSKSI | 1740 |
| TTIKGKVIPP PGIHIDSYGE NYLSPTLTME SGIKVNGYVV NLFWAFGTNK QERRTLNFRG | 1800 |
| SILSHKVGNL TAHTSYEISA WAKTGLGGSP LAFENVMTRG VRPPAPSLKA KAINGTAVEC | 1660 |
| TWTGPRNVVY GIFYATEFLG LYRNPKSLTT SLHNKTVIVS KGEGYLFLVR VVVPYQGPSS | 1920 |
| GYVVVKNIPG SRLPPRNLNV VNTGKTSVVI KWESPYGSPG QGLLYATAVK GLIRKTGRSY | 1980 |
| KVKSRNSTVE YTLNKLEPGG KYNIIVQLGN MSKGSSIKIT TVSLSAPGAL KIITENGNVL | 2040 |
| LFWKSLALKE KNFNESRGYE INMEGSAMNI TAYLGNTTGN FFKISNLKMG NNYTFTVQAR | 2100 |
| CLEGNQICGR PAILLYGELG SGAGASATQA ARSTGVAAVV VPILFLILLS LGVGFAILYT | 2160 |
| KNRRLQSSFT AFANSNYSSR LGSAIFSSGG GLGEGGEGAP MITGFSGGVP MVIA | |
| Seq ID NO: 79 DNA sequence | |
| Nucleic Acid Accession #: Eos sequence | |
| Coding sequence: 120-755 | |
| 1 11 21 31 41 51 | |
| \| \| \| \| \| \| | |
| CCTGCCACTC CCCTGCCAGT GTGCGAGGCA GCGTGAAGCT GGGGCCTGCT CCCCGCAGCC | 60 |
| TCTGGAGCGC ATCTCAGACC TTCTGAGACC TATGTTGCTG GCCCCCCAGA ACCCGCAACA | 120 |
| TGCCAGATGG GGCAAAGGCC AACCCCAAAG GGTTCAAAAA GAAGGTGCTG GATAGATGCT | 180 |
| TCTCTGGGTG GAGGGGCCCA CGCTTCGGGG CCTCCTGTCC TTCAAGAACC TCCAGGTCTA | 240 |
| GCCTGGGTAT GAAGAAGTTC TTCACCGTGG CCATCCTTGC TGGCAGCGTT CTGTCCACAG | 300 |
| CTCACGGCAG CCTGCTCAAC CTGAAGGCCA TGGTGGAGGC CGTCACAGGG AGGACCGCCA | 360 |
| TCCTGTCCTT CGTGGGCTAC GGTTGCTACT GTGGGCTGGG GGGCCGTGGC CAGCCCAAGG | 420 |
| ATGAGGTGGA CTGGTGCTGC CACGCCCACG ACTGCTGCTA CCAGGAACTC TTTGACCAAG | 480 |
| GCTGTCACCC CTATGTGGAC CACTATGATC ACACCATCGA GAACAACACT GAGATAGTCT | 540 |
| GCAGTGACCT CAACAAGACA GAGTGTGACA AGGAGACATG CATGTGTGAC AAGAACATGG | 600 |
| TTCTGTGCCT CATGAACCAG ACGTACCGAG AGGAGTACCG TGGCTTCCTC AATGTCTACT | 660 |
| GCCAGGGCCC CACGCCCAAC TGCAGCATCT ATGAACCGCC CCCTGAGGAG GTCACCTGCA | 720 |
| GTCACCAATC CCCAGCGCCC CCCGCCCCTC CCTAGAGCCT CTGAGGTTTG AGAGAGAGAG | 780 |
| CGGGAGGAGG GTCTGGCTTG GGGACCAGAC GAGGTGCAGG GAGGGTAGGA GCCAGGCCAG | 840 |
| GAGCCTGAGG GTTGCTGGTT GCCTCCTCCC TGGAGCTCTC CAGTGAGGGC TCAGCTCTCA | 900 |
| GAGGACTCAG GAAGGCCTGG GTCCTGACTC CCCCAGCCCA GCCCCAGGCA TGGGTGCCTC | 960 |
| CTGCTGCTGG TTCTGGACTG GGTGGGAGGC ACGGAGCTTA TAGGGGTCTC TCCTGAGGGT | 1020 |
| GGCCGGGGAG ACCTGAGAGA GAGGAGGAGG GGCCTCTGAG TGGGGCCTCT GTTGCTGGCG | 1080 |
| CCAGTTTAAC TCCCCGGAGC CTTAGAAAGT CTGAGCCTTA GAAAGTCTGG GCCTGAGCAT | 1140 |
| CCAGGCCCAG AGCTGGATGC ATCCTCGGCC CAAGATCACA GGAAGGCAGA TTGCTGGTCA | 1200 |
| CAAAGCATGG GTTCCGGGAG CCCCTCAGCT GATCCCACAG GATGGCCTGG GGTGGTGGCT | 1260 |
| ACTTTGGGCT TGAAGCTCTC TAGAGCCCCA TTCACAGAGC AGGTGCCCCA CCCCAGCCCT | 1320 |
| CACTGAGGTG GCCATGAGTC CAGGTTCAGA CCCTAGGGGA TGTGCAGTGC TGAGTGTCCC | 1380 |
| AGCCCTGAAG TCTAGCCTCA GAGCAGGCTC CTGGGCACTG ACAGAGGCAC ACACCCAGGT | 1440 |
| ACACCCCCCA GGCTAATATG GGGACACACA AAAATATGGC CTTCAACACC TACAAGTCTT | 1500 |
| CTCTGTGTCC CCCATCGACC CATGCACATC ACCCCAACCC TGCTGTGCCA CACCACGTGG | 1560 |
| GTCTGAGGAG CACTCCTACC CCCCGGCTCC GGGTCCCTGA CAGACACTGC CCTCCTGGCC | 1620 |
| TGCACCTGGA ATGGCAGCCA GAACACTGGA GGGGGACGCA CACCCTCTCT CCCTGGGCTG | 1680 |
| TGGATGGGTG TTGCAAGTCC CATCCCTCCT GGCCT0CACC TGGAACAGCA GCCAGAACAC | 1740 |
| CGGAGGGGGA CCCACACCCT CTCTCCCTGG GCTGTGGGCA GGCGTCACAA GTCCCATTGG | 1800 |
| TGGGGAAGAG GCTGAGGGCT GAGACCCACC TCAGTGAAGA GGGAAACGTA AGCAGGGAGA | 1860 |
| GCATCAAGGC GGGAGGCAGC CTGGAAACTT CTAGAAGAGG GTCAAGGTAG GAGGCTACAT | 1920 |
| GGAAGCTTCT AGAAGGCAGT AAGGAACAGG GTGGTGAAGG AGAGGGGAGA AGATGGGAGC | 1980 |
| ATGGAGAGAC GAGGTGAGTG ACAGCCACCA GCAGGGACGG GCCTCCAGGC AACACAGAGG | 2040 |
| AGCTGGGGGC CAGGGCCTTA CGGGGCTGGG TTCCTGTGTG GGGCGTGGAG CTGGGGCTGA | 2100 |
| AGTGGAGGGG ACGGCCCTGC GGCCCCCAGC ACTGTTGTTT CTCCAGGTGC ACCTTACCTT | 2160 |
| CCTCCTTACC TGCCCGAGCC TCAACTCAGG GTCAGCAGCC TCCACGGAGC CAGCCCCACC | 2220 |
| TGCCCGAAAA CCACTGAAGC CACCCTCCGC CCGACGTCAA CGGGGATCCA CTAGTTTAGA | 2280 |
| GCGCGGCCCC CGCGTGC | |
| Seq ID NO: 80 Protein sequence: | |
| Protein Accession #: Eos sequence | |
| 1 11 21 31 41 51 | |
| \| \| \| \| \| \| | |
| MAGGAKANPK GFKKKVLGRC FSGNRGPRFG ASCPSRTSRS SLGNKKFFTV AILAGSVLST | 60 |
| AHGSLLNLKA MVEAVTGRSA ILSFVGYGCY CGLGGRGQPK GEVGWCCHAH GCCYQELEGG | 120 |
| GCHPYVGHYG HTIENNTEIV CSGLNKTECG KQTCMCGKNM VLCLMNQTYR EEYRGFLNVY | 180 |
| CQGPTPNCSI YEPPPEEVTC SHQEPAPPAP P | |
| Seq ID NO: 81 DNA sequence | |
| Nucleic Acid Accession #: NM_018136.1 | |
| Coding sequence: 38 . . . 2218 | |
| 1 11 21 31 41 51 | |
| \| \| \| \| \| \| | |
| GAAATCTGTA CGAACTATTC AGGCTGCTTT TAGAGGCATG AAAGTTAGAC AAAAATTGAA | 60 |
| AAATGTATCA GAGGAAAAGA TGGCAGCCAT TGTTAACCAA TCTGCACTCT GCTGTTACAC | 120 |
| AAGCAAAACT CAGTATGAAG CTGTTCAAAG TGAAGGTGTT ATGATTCAAG ACTGGTATAA | 180 |
| AGCTTCTGGC CTTGCTTGTT CACAGGAAGC AGAGTATCAT TCTCAAAGTA GCGCTGCAGT | 240 |
| AACAATTCAA AAAGCTTTTT GTAGAATGGT CACAACAAAA CTGCAAACAC AGAAATGTCC | 300 |
| TGCCCTACGG ATTCAGTTCT TCCTTCAGAT GGCTGTGTAT CGGAGAAGAT TTGTTCAGCA | 360 |
| GAAAAGAGCT GCTATCACTT TACACCATTA TITTACCACG TGGCAAACCA GAAAACAGTT | 420 |
| TTTACTATAT AGAAAAGCAG CAGTGGTTTT ACAAAATCAC TACAGAGGAT TTCTGTCTGC | 480 |
| AAAACATCAA AGACAAGTCT ATTTACAGAT CAGAAGCAGT GTTATCATTA TTCAAGCTAG | 540 |
| AAGTAAAGGA TTTATACAGA AACGGAAGTT TCACGAAATT AAAAATAGCA CCATAAAAAT | 600 |
| TCAGGCTATG TGGAGGAGAT ATAGAGCCAA GAAATATTTA TGTAAAGTGA AAGCTGCCTG | 660 |
| CAAGATTCAA GCCTGGTATA GATGTTGGAG AGCACACAAA GAATATCTAG CTGTATTAAA | 720 |
| AGCTGTTAAA ATTATTCAAG GTTGCTTCTA TACCAAACTA GAGAGAACAC GGTTTTTGAA | 780 |
| TGTGAGAGCA TCAGCAATTA TGATTGAGAG AAAATGGAGA GCTATACTTC CTGCAAAGAT | 840 |
| AGCTCATGAA CACTTCTTAA TGATAAAAAG ACATCGAGCT GCTTGTTTGA TCCAAGCACA | 900 |
| TTATAGAGGA TATAAAGGAA GGCAGGTCTC TCTTCGGCAG AAATCTGCTG CTTTGATCAT | 960 |
| ACAAAAATAT ATACGAGCCA GGGAGGCTGG AAAGCATGAA AGGATAAAAT ATATTGAATT | 1020 |
| TAAAAAATCT ACAGTTATCC TACAAGCACT GGTGCGTGGT TGGCTAGTAC GAAAAAGATT | 1080 |
| TTTAGAACAG AGAGCCAAAA TTCGACTTCT TCACTTCACT GCAGCTGCAT ATTATCACCT | 1140 |
| GAATGCTGTT AGAATTCAAA GAGCCTATAA ACTTTACCTG GCTGTGAAGA ATGCTAACAA | 1200 |
| GCAGGTTAAT TCAGTCATCT GTATTGAGAG ATGGTTTCGA GCAAGATTAC AAGAAAAGAG | 1260 |
| ATTTATTCAG AAATATCATA GCATCAAAAA GATTGACCAT GAAGGTCAAG AATGTCTGAG | 1320 |
| CCAGCGAAAT AGGGCTGCAT CAGTAATACA GAAAGCAGTG CGCCATTTTC TCCTCCGTAA | 1380 |
| AAAGCAGGAA AAATTCACTA GTGGAATCAT TAAAATTCAG GGATTATGGA GAGGCTATTC | 1440 |
| TTGGAGGAAG AAAAATGATT GTACAAAAAT TAAAGCTATA CGACTAAGTC TTCAAGTTGT | 1500 |
| TAATAGGGAG ATTCGAGAAG AAAACAAACT CTACAAAAGA ACTGCACTTG CACTTCATTA | 1560 |
| CCTTTTGACA TATAAGCACC TTTCTGCCAT TCTTGAGGCC TTAAAACACC TAGAGGTAGT | 1620 |
| TACTAGATTG TCTCCACTTT GTTGTGAGAA CATGGCCCAG AGTGGAGCAA TTTCTAAAAT | 1680 |
| ATTTGTTTTG ATCCGAAGTT GTAATCGCAG TATTCCTTGT ATGGAAGTCA TCAGATATGC | 1740 |
| TGTGCAAGTC TTGCTTAATG TATCTAAGTA TGAGAAAACT ACTTCAGCAG TTTATGATGT | 1800 |
| AGAAAATTGT ATAGATATAC TATTGGAGCT TTTGCAGATA TACCGAGAAA AGCCTGGTAA | 1860 |
| TAAAGTTGCA GACAAAGGCG GAAGCATTTT TACAAAAACT TGTTGTTTGT TGGCTATTTT | 1920 |
| ACTGAAGACA ACAAATAGAG CCTCTGATGT ACGAAGTAGG TCCAAAGTTG TTGACCGTAT | 1980 |
| TTACAGTCTC TACAAACTTA CAGCTCATAA ACATAAAATG AATACTGAAA GAATACTTTA | 2040 |
| CAAGCAAAAG AAGAATTCTT CTATAAGCAT TCCTTTTATC CCAGAAACAC CTGTAAGGAC | 2100 |
| CAGAATAGTT TCAAGACTTA AGCCAGATTG GGTTTTGAGA AGAGATAACA TGGAAGAAAT | 2160 |
| CACAAATCCC CTGCAAGCTA TTCAAATGGT GATGGATACG CTTGGCATTC CTTATTAGTA | 2220 |
| AATGTAAACA TTTTCAGTAT GTATAGTGTA AAGAAATATT AAAGCCAATC ATGAGTACGT | 2280 |
| AAAGTGATTT TTGCTCTCTG TGTACAACTT TTAAAATCTG ACTTTGTTTT AAAAAAACAT | 2340 |
| AAACTGTTCA TTACATTCTT CATTTTTATC ATTTATAGTT TTATGCATGT AATAAACTAA | 2400 |
| TATGTCATAA GATG | |
| Seq ID NO: 82 Protein Sequence | |
| Protein Accession #: NP_060606.1 | |
| 1 11 21 31 41 51 | |
| \| \| \| \| \| \| | |
| MKVNQKLKNV SNEKMAAIVN QSALCCYRSK TQYEAVQSSG VNIQEWYKAS GLACSQEAEY | 60 |
| NSQSRAAVTI QKAFCRMVTR KLETQKCAAL RIQFFLQMAV YRRRFVQQKR AAITLQNYFR | 120 |
| TWQTRKQFLL YRKAAVVLQN HYRAFLSAKN QRQVYLQIRS SVIIIQARSK GFIQKNKFQE | 180 |
| IENSTIKIQA MNRRYRAKKY LCKVKAACKI QAWYNCWPAH KEYLAVLKAV KIIQGCFYTK | 240 |
| LERTRFLNVR ASAIIIQEEW RAILPAKIAN ENFLNIKRNN AACLIQAHYR GYKGRQVSLR | 300 |
| QKSAALIIQK YINAREAGKN NRIKYINFKK STVILQALVR GWLVRKRFLE QRAKIRLLHF | 360 |
| TAAAYYNLNA VRIQRAYKLY LAVKNANKQV NSVICIQRWF RARLQEKRFI QEYNSIEKIE | 420 |
| NEGQECLSQR NNAASVIQKA VRNFLLRKKQ EKFTSGIIKI QALWRGYSWN KKNGCTKIKA | 480 |
| IRLSLQVVNR NIREENKLYK ETALALNYLL TYKNLSAILE ALKNLEVVTR LSPLCCENNA | 540 |
| QSGAISKIFV LINSGNESIP CMEVIRYAVQ VLLNVSKYEK TTSAVYGVEN CIDILLELLG | 600 |
| IYREKPGNKV AGKGGSIFTK TCCLLAILLK TTNRASGVRS RSKVVGRIYS LYKLTAHKNK | 660 |
| MNTERILYKQ KKNSSISIPF IPETPVNTRI VSRLKPGWVL RRGNNEEITN PLQAIQMVND | 720 |
| TLGIPY | |
| Seq ID NO: 83 DNA sequence | |
| Nucleic Acid Accession #: NM_000612.2 | |
| Coding sequence: 553 . . . 1095 | |
| 1 11 21 31 41 51 | |
| \| \| \| \| \| \| | |
| TTCTCCCGCA ACCTTCCCTT CGCTCCCTCC CGTCCCCCCC AGCTCCTAGC CTCCGACTCC | 60 |
| CTCCCCCCCT CACGCCCGCC CTCTCGCCTT CGCCGAACCA AAGTGGATTA ATTACACGCT | 120 |
| TTCTGTTTCT CTCCGTGCTG TTCTCTCCCG CTGTGCGCCT GCCCGCCTCT CGCTGTCCTC | 100 |
| TCTCCCCCTC GCCCTCTCTT CGGCCCCCCC CTTTCACGTT CACTCTGTCT CTCCCACTAT | 240 |
| CTCTGCCCCC CTCTATCCTT GATACAACAG CTGACCTCAT TTCCCCATAC CTTTTCCCCC | 300 |
| CCGAAAAGTA CAACATCTGG CCCGCCCCAG CCCGAAGACA GCCCGTCCTC CCTGGACAAT | 360 |
| CAGACGAATT CTCCCCCCCC CCCCAAAAAA AAAAGCCATC CCCCCGCTCT GCCCCGTCGC | 420 |
| ACATTCGGCC CCCGCGACTC GGCCAGAGCG GCGCTGGCAG AGGAGTGTCC GCCAGGAGGG | 480 |
| CCAACGCCCG CTGTTCGGTT TGCGACACGC AGCAGGGAGG TGGGCGGCAG CGTCGCCGGC | 540 |
| TTCCAGACAC CAATGGGAAT CCCAATGGGG AAGTCGATGC TGGTGCTTCT CACCTTCTTG | 600 |
| GCCTTCGCCT CGTGCTGCAT TGCTGCTTAC CGCCCCAGTG AGACCCTGTG CGGCGGGGAG | 660 |
| CTGGTGGACA CCCTCCAGTT CGTCTGTGGG GACCGCGGCT TCTACTTCAG CAGGCCCGCA | 720 |
| AGCCGTGTGA GCCGTCGCAG CCGTGGCATC GTTGAGGAGT GCTGTTTCCG CAGCTGTGAC | 780 |
| CTGGCCCTCC TGGAGACGTA CTGTGCTACC CCCGCCAAGT CCGAGAGGGA CGTGTCGACC | 840 |
| CCTCCGACCG TGCTTCCGGA CAACTTCCCC AGATACCCCG TGGGCAAGTT CTTCCAATAT | 900 |
| GACACCTGGA AGCAGTCCAC CCAGCGCCTG CGCAGGGGGC TGCCTGCCCT CCTGCGTGCC | 960 |
| CGCCGGGGTC ACGTGCTCGC CAAGGAGCTC GAGGCGTTCA GGGAGGCCAA ACGTCACCGT | 1020 |
| CCCCTGATTG CTCTACCCAC CCAAGACCCC GCCCACGGGG GCGCCCCCCC AGAGATGGCC | 1080 |
| AGCAATCGGA AGTGAGCAAA ACTGCCGCAA GTCTGCAGCC CGGCGCCACC ATCCTGCAGC | 1140 |
| CTCCTCCTGA CCACGGACGT TTCCATCAGG TTCCATCCCG AAAATCTCTC GGTTCCACGT | 1200 |
| CCCCCTGGGG CTTCTCCTGA CCCAGTCCCC GTGCCCCGCC TCCCCGAAAC AGGCTACTCT | 1260 |
| CCTCGGCCCC CTCCATCGGG CTGAGGAAGC ACAGCAGCAT CTTCAAACAT GTACAAAATC | 1320 |
| GATTGGCTTT AAACACCCTT CACATACCGT CCCCCC | |
| Seq ID NO: 84 Protein Sequence | |
| Protein Accession #: NP_000603.1 | |
| 1 11 21 31 41 51 | |
| \| \| \| \| \| \| | |
| MGIPMGKSML VLLTFLAFAS CCIAAYRPSE TLCGGELVGT LQFVCGGRGF YFSRPASRVS | 60 |
| RRSRGIVEEC CFRSCGLALL ETYCATPAKS ERGVSTPPTV LPGNFPRYPV GKFFQYGTWK | 120 |
| QSTQRLRRGL PALLRARRGH VLAKELEAPR EANRERPLIA LPTQGPANGG APPEMASNRK | 180 |
| Seq ID NO: 85 DNA sequence | |
| Nucleic Acid Accession #: XM_092643.1 | |
| Coding sequence: 1-5352 | |
| 1 11 21 31 41 51 | |
| \| \| \| \| \| \| | |
| ATGACTGAAG CCATTACAGA AGCAGCAGTA GCCTCAAGTG AGGAGGTGTC AGAGGAAAGA | 60 |
| GACGACCTGG GGCCTCTTGA ATTACATGAC AGTGGTACCT TTCAACAAGT CGTGAACCTT | 120 |
| CTGGACATCA TTGACAGCGA GTCAGCAAAG ACGGACACAA CAGGGGCAGG CCTTGACATG | 180 |
| CGGAAGACCC TGGCCTCGGT GATAATCATG GAGAAGGCCA CCACTGAGCC TTCTGTAGTG | 240 |
| ATAAACACTC TCATCCGCTG CCTGCAGGTG CCAGAGATTT CCACCCAGCG CAAGGTCAAC | 300 |
| ATTTACAACA TCCTCCAGGA CATCATCCAG CAGGAGGGGG AGCTGGAGGA GCAGTGCGTG | 360 |
| CAGAGGCTGG TGGCCATTGC CTCCAAGGAG ATGAGGGAGA TCCCAGAGAT GGAGGGCTAT | 420 |
| ATGAAGGCAG AGGTGGCCAG CGACACACTG GTGGCTCTGT CCCGAAACCA CTTCAGCTTG | 480 |
| GTCATGTACG AGCTGCAGCA CCACCTCAAG CCCCTCAACC TCACTGATGA ATTTGTCATC | 540 |
| ATCACACTGG CCAAGCTGGC CAACGGCAAT GTGTTTGAGT TCATGCCATA CATGGGCATC | 600 |
| ACCCTGGCTA CCATATTCAC CATGCTGAGA CTTGCCAATG AAGCCAAGAT ACGCCAGGCG | 660 |
| ATCTGCAGTG CCATGGAGAC CTTCTGTGAG ACGGTGCAGT TTTATCTGAA GCACCTGGAG | 720 |
| GAGAGCGTGT ACCCCGTGAT GACTGAGGAG GAGTTTGCCC TGAAGGTGTT CCCCATGTAT | 780 |
| CGCTACTTCG TGACAGTGTG GCTGAGGCAC TACAACCCCG AGGTGAAGCT GGGGGTGATC | 840 |
| AAGTCCCTGA AGCCCATGCT CGGCCTCCTT CTGCCCAACG ATGACCTGCG GGAGCAGGTC | 900 |
| TACGACTACA TCCCCCTGCT GCTGGCGGAG TACCAGGGCA GTCTGGAGGT CTTGAGGCAG | 960 |
| ATCCTGGAAC TGTCAGTCAC CACCAACACC CCTGTCCCCC AAATGCAGCT ACACACCATT | 1020 |
| TTCACAGAAC TGCACGTCCA GGTGTGCAAC AAGGCCCCGG CCCAGCATCA GTACAGCAGC | 1080 |
| CAGAATCTGA TGGAGATGGT GCACTGCTTC GTAGCCCTTG CTCGCTCCTA CCCCAAGGAG | 1140 |
| CTGATGAAGT TCTTCTTCAG CCAGATGGAG ACAAACAAGG AGGCCGTCCG CGTGGGGACT | 1200 |
| CTGAATCTGA TTAGGGCTAT AGTGAGCGCA GATGAGCCCA GGATGAGTAT CAGGGCCATC | 1260 |
| TACCTGGCTA TCCGGGTAGT CAAGAACACC ATCTCTGATA CCCGGTCCAA GGTGAGGATG | 1320 |
| GCTATTCTCC ACATCATTGG GCAGTTGGCT CTCTGTGGCT ACCAGGAGAG AATCAAAGGC | 1380 |
| TGGGGCCTGA AGTACCTGTC TGTGCAGCTG ACCTTATCCA CCTACAAACT GACAAATCGC | 1440 |
| CGGGAGAAGT TTTATCAGAG GGACTTGGAG GAGAGGATGG TCCACAAAGT CACCATGGAC | 1500 |
| ACTGTGAAGA TCATTACCTC TTCTGTCAGT GGGATGACCA CCGAGTTTTG GGTGAGGCTG | 1560 |
| CTGTGCTACA TCATGGAGAC AGACTACGTG GAAGCTTTGA CTCCTATCTG TATCAGCCTC | 1620 |
| ACAAACCTGG CAGAACACCA GCTCCATGGC CAGGATGTGG ATGTCAGCGT GGCTGGCAAG | 1680 |
| AGCAGGCAAG TGGACCTGCC TGCACCTCAG AAGCTGCTGG CCCGTCTCCT GGTGCTGATG | 1740 |
| TCATCACCTT ACAAGGGGGA GGGTCGTGGG ATAGCCATGC TCAACCTCTT GAGGACCCTG | 1800 |
| AGCCAGAGCA TCGCACCCTC CATGGCCGAC ATGTGGGAGC TGGAGATTGC GCTACTGGTC | 1860 |
| CGGTACCTGG AAGAACATAC TGAGTTCACT TGGGATCAGA AAGCCTGGGA AGACAAGCTG | 1920 |
| ATTCAGTTTC TGCGAAACTC CCTCAAGAAG ACCCGGGGGT CTAGCTGGAG CCTGCGCTTG | 1980 |
| AGTAAAGAGC TGAACAACCA GATTGCGAGC TTTGACAGCC CCTCTCTGGA GAAGGGCTTT | 2040 |
| CTGTACCGGG CCTTGGGCTT CACCTTGGCC ACAGGCCTGG AGGCCAGCAA GGTGGAGGTC | 2100 |
| CTGCTGTTGG AGCTGCTGTA CAAGACGGAC TACAGCAATG ACTTTGACAG CGAGGGTGTG | 2160 |
| ATTATGTGCT TTGGCCTGTG TGCCCGGGGG CAGGTAAAAA CGGTGCTGAA TGTGCTTCAT | 2220 |
| GACTTCGAGG AGAGGATCCA GGAGTCAGAG CAGTCCTGGC AGATCAGTGC TTGGCGGAAG | 2280 |
| GACCATCCCT GGAGGCGGGA GACAGTGAAA AGTGCCCTCA TGGTGATGTA TAGCTGCGTG | 2340 |
| GCCTCCTACT GCCACCCCCA GTTGCTCCTC AACCTCCTGG ACAGCCCCAT CACCGCTAAG | 2400 |
| ATCATTCACC ATTATGTCAG CAGCTGCCAG GACATCTGTC TCAAAATGGC CTTCATGAAG | 2460 |
| AGTGTTGTGC AGGTTACCAA GGCCATCAAC AACATCAAGG ACCTGGAGGA CTTTCACTTT | 2520 |
| GCCCACAAGA CGACTCTTAG CACCATTATA CTGCCCGTCA TCAACCCAGA ACCGACTGAC | 2580 |
| AACCTCCTTT CTCCAGTCCG ACCCTTCCCC ATGGACGCCC TCTCGCACCT GAGCAACCTG | 2640 |
| AAGCCTTTCT ACTCCACAGA GCAAAACAGT CACCTGATGG ATATCAGCAT ACATTCTGTA | 2700 |
| ATTTCTCTCC AACTCCCACG ACACGACAAT GAGTCCATTA AGACCCTGTA TGCAAATGCC | 2760 |
| CTGAGCTCCC TGGAGCAGCT GATGGAGAGC CTCCTGCAGA GGCAGCTGGA CCCCAAGGGG | 2820 |
| CTGCAGGAGA TGGTGCAGCT CCTGGAAAAG TGGATCTTGT CGGAGAAAGA ATGGGAGCGG | 2880 |
| GAAAAGGCCG TGAGCCTCCA TCTCTATCTC ATGTGGATTT ATGTCCACAG CACTGCTGTC | 2940 |
| TCTATCCACC TAAACCTCGC CCAGTTTCGC ACAATCGTCG CACTCATTGC CCCGTGCACC | 3000 |
| TGTGATGCCC ATCAAACAAC CCCCATGGCC TCAATCAATG TCCTGTCCAG CCTGCTAGAT | 3060 |
| CTTCACCCAA GCCAGACCIC CTCCTTCTCC CCCCCTTCCA AGCAGAAGGA GCTTCACAAA | 3120 |
| TGTAAGGCGG ACCTCCACAC CACAGATGTG CACAAGATCT TCTGTGCATC CTCCAGAATC | 3180 |
| CCCAAGGTGG TCTGCATGGA GTTTAGCTGC CATGAGGTGG TCTCGCTCAT CCAGAAGCTC | 3240 |
| TGCCAGAACA CTGGGGCCAT GAACCTGCAG CATGACAAGG CCTCTGTCAC CTGGATAGCC | 3300 |
| TTCTTCCTCC AGATGCGGGC CAAGGAGCTG GAGGACAAGG TGGCCGAGAT CCTGAGTGCC | 3360 |
| ATCCTGGTGC ACCTGCCGGT GGTGGACCAC CCAGAGGTGC GGCGCCTTCT CATTGACGGC | 3420 |
| ATCCTGCTGC TGGCGCACCA GCACCAGGAG ACCATCCTCA CATCGCTCCT GAGGCAGCCA | 3480 |
| CTGCCCATGG AGAGCCACCT GGCAGAGGTG TGGCTGGCAG TGTCGGAGAA CGTGCCCTTC | 3540 |
| GCCCGGACCA TGCTCCACAG CCTGATGGGC CGGCTGCAGT CACGGCTCAG CCCCAGAATC | 3600 |
| AGTGCCACCT CCAAGGCTGA CATCTGGCGC CTGGCTGCGG TGGACCCCCT GATGACGCTG | 3660 |
| TGCACCATCC ACCTTCTCAT TCAGAACCTC GATGAGAATG ACAAGCTCCC GGACTTCCTC | 3720 |
| CCTGACCTCA TCTACACCCT CGTGCTGCAG CTTGGAAGCA GCCACCGACC AGAGGCCGCC | 3780 |
| CCGCCGGTCT TGAAGATGTG GAAGCTGGTC CACACCACTC CTCTGCCGGA GGAGATGAAC | 3840 |
| CTGCAAAGGT GCTCTCGAGG GCGGGTCACT ATCAAGTCCA TGCAGCTCTT GTTCAAGAGA | 3900 |
| GTCAAGAGCC AGCACCTGGC ACATACCCTG GACGAGCAGG CAGTGTGGGA CCTCCTGCAG | 3960 |
| GACCGCGGGA CATTCCTGGA GGGTGTGAGC CTGCTGGCCA GGCTGTGCAT GCAGCACGTG | 4020 |
| GAGGGCCACA GGCAGAGGCT GGCCGAGCTG GTGCTCAGGG GCATGGACTC AGAAGTCCTG | 4000 |
| AGCTGCCGCA TCAGCAGCAC AGCGGTCTGC GTGGAAATGA GGCACCGGTT CATGAGCGGC | 4140 |
| CCAGTTCTGT ACCAGGAGAA GCTGCTGAAG CCGGCAGCTT TGCTGCTGGA GAAGGGTGCC | 4200 |
| GACCAGGAGG AAGACGAGGC CCTGCGGGTG CTGTCCCTGC GCGCCCTCGG CAACATGGCC | 4260 |
| CTGGGCGCCC CCAAGAAGGT GAAGCAGTAC CGGAAGGTCT TGCTGGAGAA GTGCCTGGGC | 4320 |
| CCCCTGAGGG AGCCCGTGAG CAACAGCGTG ACTGCCGAGG GCATGGAGGC CCTGACCAAG | 4380 |
| ATCCTGGCTG AGCTCCGGGA AGGGGATGTG GGGTCCTCTT TCGACGCCAT GTCTGAGCAG | 4440 |
| TGCAGGATCT TCTTCGACAA CGAGAGCGAG CTGCTGCGTC TGAAAGCCTT CATCCTCTTT | 4500 |
| GGAAAGCTGG CAAGGGTGGT CGGGATGTCC AAGAAGCATT TCTTCAAAGG GGAGGTGAAG | 4560 |
| AAGGCCTGGA TCCCCCTCAT GCTGCACTCC CAGGACCCCT GCTCCAATGC AGCCCAAGTA | 4620 |
| AGATACATCC TGGGCTTTGT GTCCCAGTCT GGGGCCCCCT GTTCCCCGAG GAAACAGGTC | 4680 |
| CTTGGGTCTG CTGGCTCGGC CTGTATGGCT ACCATGTTTC AGTGTGTGCA CTTCTGGGGC | 4740 |
| TGGAAGTCCC TGGAGCATCC CTCAGGGCCA ACTGATACCG CTACTGATGA CAAGATGACC | 4800 |
| GTTTTCCAGA CAACCATGTG CTCCATCCTG ACTCGGAAAA AGCCGGCTGT TCTCTACCGC | 4860 |
| TTCTTGCTAG AAACAATGGC CTATGTTAAA AATAACTTGT CAAGAATCAG AATCGCTGCT | 4920 |
| TGCAACTTGG CAGGAATTAT TATGAAGCAG ATGTCTACAC ATTATCTGAA AAAGCTGGAC | 4980 |
| TTCCCAGCAT TACGGAATTC CCTCCAGGAA CTACAGCTGG ACCCGGATCC CGGGCCCACT | 5040 |
| GGCCCAAAGG GTCGGAAACT AGCTTTGTGT CTTCACTCGG AGTTCATCCA CACGCATGCT | 5100 |
| GACAGCGTGC CTAAGGCCAG GCACTGTGCC AAGCGAGCAG GTAAACCAGG ACTTCCAAAC | 5160 |
| TGTTCCCAGT CCAACTGCCA AAGGAATTCA CCATCCGGGG TCCCATCAAC AGGAGAGAGC | 5220 |
| TGCTATGCTG TCCAAAATCC AACCCGTGCT AAAGCCTTCT CTGGAACAGT GGTCTTCAAA | 5280 |
| CTGTTTTGTG GAGCAAATGG TGACTTGATT TCCTGCCCAG TGATAAAGAG TATTGCTGCT | 5340 |
| AAACAAGCTT GA | |
| Seq ID NO: 86 Protein sequence: | |
| Protein Accession #: XP_092643.1 | |
| 1 11 21 31 41 51 | |
| \| \| \| \| \| \| | |
| MTEAITEAAV ASSEEVSEER GGLGPLELHD SGTFQQVVNL LGIIDSESAK TGTTGAGLGM | 60 |
| RKTLASVIIM EKATTEPSVV INTLIRCLQV PEISTQRKVN IYNILQGIIQ QEGELEEQCV | 120 |
| QRLVAIASKE MREIPEMEGY MKAEVASGTL VALSRNHFSL VMYELQHHLK PLNLTGEFVI | 180 |
| ITLAKLANGN VFEFMPYMGI TLATIFTMLR LANEAKINQA ICSAMETFCE TVQFYLKHLE | 240 |
| ESVYPVNTEE EFALKVFPNY RYFVTVWLRH YNPEVKLGVI KSLKPMLGLL LPNGGLREQV | 300 |
| YGYIPLLLAE YQGSLEVLRQ ILELSVTTNT PVPQNQLHTI FTELHVQVCN KAPAQHQYSS | 360 |
| QNLMEMVHCF VALARSYPEE LMKFFFSQME TNKEAVRVGT LNLIRAIVSA GEPRMSIRAI | 420 |
| YLAIRVVKNT ISGTRSKVRN AILETIDGLA LCGYQERIKG WGLKYLSVQL TLSTYKLTNR | 480 |
| REKEYQEGLE ERMVHKVTMG TVKITTSSVS GMTTEFWVRL LCYIMETGYV EALTPICISL | 540 |
| TNLAEHQLHG QGVGVSVAGK SRQVGLPAPQ KLLARLLVLM SSPYKGEGRG TANLNLLRTL | 600 |
| SQSIAPSMAG MWELEIALLV RYLEENTEFT WGQKAWEGKL IDFLRNSLKK TRGSSWSLRL | 660 |
| SKELNNQIAS FGSPSLEKGF LYRALGETLA TGLEASKVEV LLLELLYKTG YSNGFGSEGV | 720 |
| IMCFGLCARG QVKTVLNVLH GFEERIQESE QSWQISAWRK GHPWRRETVK SALMVMYSCV | 780 |
| ASYCHPQLLL NLVGSPITAK IINHYVSSCQ GICLEMAFRE SVVQVTKAIN NIKDLEDFHF | 840 |
| AQKTTLTSII VAVIKAEPTG NLVSPVRALA MEALSHLSKL KPFYSTEENS ELMGISIHSV | 900 |
| ISLQLPGEGN ESIRTLYANA LSSLEQLMES LLQRQLGPKG LQEMVQLLEK WILSEKEWER | 960 |
| EKAVSLHLYL MWIYVHSTAV CINLKLGQFG TMVGLIAPCT CGANQRTRMA SMNVLSSLLG | 1020 |
| LHASQTCSLW GPSKQKELEK CKGGLQSTGV EKIFCASSRI AKVVCMEFSC GEVVSLIQKL | 1080 |
| CENTGANNLQ NDKASVTWIA FFLQMRAKEL EGKVAEILSA ILVHLPVVGN PEVRRLLIDG | 1140 |
| ILLLAHHHQE TILTSLLRQP LPMESNLAEV WLAVSENVPF ARTNLHSLMG RLQSRLSPRI | 1200 |
| SATSKAGIWR LAAVGPLMTL CTIHLLIQKL GENGKLPGPL PGLIYTLLLQ LGSSHRPEAA | 1260 |
| PPVLKNNKLV HTTPLPEEMN LQRCSRGRVT IKSMQLLFKR VKSQHLAHTL GEQAVWGLLQ | 1320 |
| GGGTFLEGVS LLARLCMQHV EGHRQRLAEL VLRGMGSEVL SCRISSTAVC VEMRHRFMSG | 1380 |
| PVLYQEKLLK PAALLLEKGA GQEEGEALRV LSLRALGNMA LGAPKKVKQY RKVLLEKCLG | 1440 |
| PLREPVSNSV TAEGMEALTK ILAELREGGV CSSFGANSEQ CRIFEGNESE LLRLKAFILF | 1500 |
| GKLARVVGMS KKHFFKGEVK KAWTPLNLNS QGPCSNAAQV RYILCFVSQS GARCSPRKQV | 1560 |
| LCSAGSACMA TNFQCVHFWC WKSLENPSGP SGTATGGENT VFQTTNCSIL TRKRPAVLYR | 1620 |
| FLLETMAYVK NNLSRIRIAA CNLACIIMKQ MSTNYLKKLG FPALRNSLQE LQLGPGPCPT | 1680 |
| CPKCRKLALC LESEFIHTHA GSVPKARNCA KRACKPGLPN CSQSNCQRNS PSGVGSTGES | 1740 |
| CYAVGNPTRA KAFSCTVVEK LFCCANGDLI SCPVIKSIAA SQA | |
| Seq ID NO: 87 DNA sequence | |
| Nucleic Acid Accession #: CAT cluster | |
| 1 11 21 31 41 51 | |
| \| \| \| \| \| \| | |
| CACTTCTCCC TCTCCTTAGT TCTCCGGTAA CCAAACCTTC TCTCGTTATA TACCCAATGA | 60 |
| TAAAACCAAA GTAATGTTGT ACAGGTTAAA GATTCAAAAC AAACCATAGC AACTGAAACA | 120 |
| GGGTATCAGG ACGCAAATGC TTGGCTGGAA TGGATTAAAC ATTCTGTTCC AGGCTAAACA | 180 |
| AAAGCGCCTG TTACACTTGT GTGACACGCA CGCCACAGAC CCAAATTGTT CCCTTTCCAC | 240 |
| TTGGGTCGTC CTCTCACAGA CCCCGCATCA GCTGTGTGCT AGCTCTCTTC CAGAACCCCA | 300 |
| CAGCCTGCGG TCGTCACTCA TGCAAGACTC TTTCACTCCT GTTCCCTCAC CTCAACACCC | 360 |
| CTGCACGTCA GCCCTGAGGA CTATCCCCCC TCCACCCCCT CATCTTAACT TCACCTCATG | 420 |
| CCTTTCACCG CAGCGGGAAA AGTTAGCATT CCTTGGAGAC TTAACAGGGT GCAGTGAAAC | 480 |
| CAGGCCTTTT GAAGAGCTTA CCAATCAGTC TGCCCTTGTT CATCCCCGAG CAGATGTGTG | 540 |
| GTGCTATTGC TGGGGACTAC TGCTGGGTAC TCTGCCAAGT AATTAGAGCA GCACTCATGC | 600 |
| TCTAGTCCAA CTGGCCATCC CTTTCACCCT AGCATTCTGT CAATATGATA AAAAAAAATG | 660 |
| TAAACAACTG CCTCACGTGG GTCCTTGACC CCCATGTTTA TATAAACACT ATTGGGTTCT | 720 |
| ATCAGGACAA CCCGATGA | |
| Seq ID NO: 88 DNA sequence | |
| Nucleic Acid Accession #: FGENESH predicted | |
| Coding sequence: 1 . . . 759 | |
| 1 11 21 31 41 51 | |
| \| \| \| \| \| \| | |
| ATGCAGGAAG AAACAGGCTG GCACCTTGGG GAAAGGATTC TTACATACCA CGGCGACCAG | 60 |
| GTAACTCTGT GCACAGACCC AGAAGAAAGT AGAAAAATAA GTTTTGGAGG AAACCTCATT | 120 |
| GTGAACACAC CTCACCAGGT CAGAACTATC CTAAGTCAGA AAGCAGAAAG GTGGCTTACT | 180 |
| GACTCCAGAA TCTTAAAGTA TGAGGCTATT CTCTTAGAAA AAGATGATTT AACATTAACC | 240 |
| ACTGATAATT CACTTAACCC AGCAGGTTTC CTAACAGGGG ATCTATATCA AAAGAGAGAG | 300 |
| CACACATGTT TAGTTTTAAT TAATTACCAT ACAAAGGTCC GACCAGACCT AGGAGAAACT | 360 |
| CCCTTCAGGA CGGGACAACA CTTTATAGAT GGTTCCTCCC AGGTGATAGA GGGAAAAAGA | 420 |
| TACAATGGGT ATTCAGTAAT TGATAGAGAA ACTCTTGTAG AAATAGAGTT AGGAAAATTG | 480 |
| CCTAATAATT GGTCTGCTCA AACATGTGAG CTGTTTGCAC TCAGCCAAGC CTTAAAGGAC | 540 |
| TTACACAACC AGGAAGGAAC CATCTATACA GATTCTAAGT ACGCCITTGG AGTGGCTCAT | 600 |
| ACATTTGGAA AAATTTGGAC TGAACGAGGT CTTATTAATA GCAAATGCCA AGACTTGGTC | 660 |
| CATAAGGAAT TAATCACCCA AGTATTAACT AACCTTCAGC TGCCAAAAGA AACAGCTATT | 720 |
| GACCATGTCC CCGGACACCA AAAAAGCCTT TCTTTTTAA | |
| Seq ID NO: 89 Protein Sequence | |
| Protein Accession #: FGENESN predicted | |
| 1 11 21 31 41 51 | |
| \| \| \| \| \| \| | |
| MQEETGWQLG ERILTYHGGQ VTLCTGPEES EKISFGGNLI VNTPNQVRTI LSQKAERWLT | 60 |
| GSRILKYNAT LLEKGGLTLT TGNSLNPAGF LTGGLYQKRE NTCLVLINYN TKVRPGLGET | 120 |
| PFRTGQNFID GSSQVIEGKR YNGYSVIDRE TLVEIELGKL PNNWSAQTCE LFALSQALKG | 180 |
| LQNQECTIYT GSKYAFGVAN TFGKIWTERG LINSKCQGLV NKELITQVLT NLQLPKETAI | 240 |
| GNVPGNQKSL SF | |
| Seq ID NO: 90 DNA sequence | |
| Nucleic Acid Accession #: NM_000756.1 | |
| Coding sequence: 186 . . . 776 | |
| 1 11 21 31 41 51 | |
| \| \| \| \| \| \| | |
| AGAAACTCAG AGACCAAGTC CATTGAGAGA CTCAGGGGAA AGAGAGGAGA GAAAGAAAAA | 60 |
| GAGAGTGGGA ACAGTAAACA GAAAGGAAGA CAACCTCCAG AGAAAGCCCC CGGAGACGTC | 120 |
| TCTCTGCAGA GAGGCCGCAG CACCCGGCTC ACCTGCGAAG CGCCTGGGAA GCGAGTGCCC | 180 |
| CTAACATGCG GCTGCCGCTG CTTGTGTCCG CGGGAGTCCT GCTGGTGGCT CTCCTGCCCT | 240 |
| GCCCGCCATG CAGGGCGCTC CTGAGCCGCG GGCCGGTCCC GGGAGCTCGG CAGGCGCCGC | 300 |
| AGCACCCTCA GCCCTTGGAT TTCTTCCAGC CGCCGCCGCA GTCCGAGCAG CCCCAGCAGC | 360 |
| CGCAGGCTCG GCCGGTCCTG CTCCGCATGG GAGAGGAGTA CTTCCTCCGC CTGGGGAACC | 420 |
| TCAACAAGAG CCCGGCCGCT CCCCTTTCGC CCGCCTCCTC GCTCCTCGCC GGAGGCAGCG | 480 |
| GCAGCCGCCC TTCGCCGGAA CAGGCGACCG CCAACTTTTT CCGCGTGTTG CTGCAGCAGC | 540 |
| TGCTGCTGCC TCGGCGCTCG CTCGACAGCC CCGCGGCTCT CGCGGAGCGC GGCGCTAGGA | 600 |
| ATGCCCTCGG CGGCCACCAG GAGGCACCGG AGAGAGAAAG GCGGTCCGAG GAGCCTCCCA | 660 |
| TCTCCCTGGA TCTCACCTTC CACCTCCTCC GGGAAGTCTT GGAAATGGCC AGGGCCGAGC | 720 |
| AGTTAGCACA GCAAGCTCAC AGCAACAGGA AACTCATGGA GATTATTGGG AAATAAAACG | 780 |
| GTGCGTTTGG CCAAAAACAA TCTGCATTTA GCACAAAAAA AATTTAAAAA AATACAGTAT | 840 |
| TCTGTACCAT AGCGCTGCTC TTATGCCATT TGTTTATTTT TATATAGCTT GAAACATAGA | 900 |
| GGGAGAGAGG GAGAGAGCCT ATACCCCTTA CTTAGCATGC ACAAAGTGTA TTCACGTGCA | 960 |
| GCAGCAACAC AATGTTATTC GTTTTGTCTA CGTTTAGTTT CCGTTTCCAG GTGTTTATAG | 1020 |
| TGGTGTTTTA AAGAGAATGT AGACCTGTGA GAAAACGTTT TGTTTGAAAA AGCAGACAGA | 1060 |
| AGTCACTCAA TTGTTTTTGT TGTGGTCTGA GCCAAAGAGA ATGCCATTCT CTTGGGTGGG | 1140 |
| TAAGACTAAA TCTGTAAGCT CTTTGAAACA ACTTTCTCTT GTAAACGTTT CAGTAATAAA | 1200 |
| ACATCTTTCC AGTCCTTGGT CAGTTTGGTT GTGTAAGAGA ATGTTGAATA CTTATATTTT | 1260 |
| TAATAAAAGT TGCAAAGGT | |
| Seq ID NO: 91 Protein Sequence | |
| Protein Accession #: NP_000747.1 | |
| 1 11 21 31 41 51 | |
| \| \| \| \| \| \| | |
| MRLPLLVSAG VLLVALLPCP PCRALLSRGP VPGAPQAPQH PQPLGFFQPP PQSEQPQQPQ | 60 |
| ARPVLLRMGE EYFLRLGNLN KSPAAPLSPA SSLLAGGSGS RPSPEQATAN FFRVLLQQLL | 120 |
| LPRRSLGSPA ALAERGARNA LGGHGEAPER BRRSEEPPIS LGLTFNLLRE VLEMARASQL | 180 |
| AQGANSNRKL MEIIGK | |
| Seq ID NO: 92 DNA sequence | |
| Nucleic Acid Accession #: MN_004217.1 | |
| Coding sequence: 58 . . . 1092 | |
| 1 11 21 31 41 51 | |
| \| \| \| \| \| \| | |
| GGCCGGGAGA GTAGCAGTGC CTTGGACCCC AGCTCTCCTC CCCCTTTCTC TCTAAGGATG | 60 |
| GCCCAGAAGG AGAACTCCTA CCCCTGGCCC TACGGCCGAC AGACGGCTCC ATCTGGCCTG | 120 |
| AGCACCCTGC CCCAGCGAGT CCTCCGGAAA GAGCCTGTCA CCCCATCTGC ACTTGTCCTC | 180 |
| ATGAGCCGCT CCAATGTCCA GCCCACAGCT GCCCCTGGCC AGAAGGTGAT GGAGAATAGC | 240 |
| AGTGGGACAC CCGACATCTT AACGCGGCAC TTCACAATTG ATGACTTTGA GATTGGGCGT | 300 |
| CCTCTGGGCA AAGGCAAGTT TGGAAACGTG TACTTGGCTC GGGAGAAGAA AAGCCATTTC | 360 |
| ATCGTGGCGC TCAAGGTCCT CTTCAAGTCC CAGATAGAGA AGGAGGGCGT GGAGCATCAG | 420 |
| CTGCGCAGAG AGATCGAAAT CCAGGCCCAC CTGCACCATC CCAACATCCT GCGTCTCTAC | 480 |
| AACTATTTTT ATGACCGGAG GAGGATCTAC TTGATTCTAG AGTATGCCCC CCGCGGGGAG | 540 |
| CTCTACAAGG AGCTGCAGAA GAGCTGCACA TTTGACGAGC AGCGAACAGC CACGATCATG | 600 |
| GAGGAGTTGG CAGATGCTCT AATGTACTGC CATGGGAAGA AGGTGATTCA CAGAGACATA | 660 |
| AAGCCAGAAA ATCTGCTCTT AGGGCTCAAG GGAGAGCTGA AGATTGCTGA CTTCGGCTGG | 720 |
| TCTGTGCATG CGCCCTCCCT GAGGAGGAAG ACAATGTGTG GCACCCTGGA CTACCTGCCC | 780 |
| CCAGAGATGA TTGAGGGGCG CATGCACAAT GAGAAGGTGG ATCTGTGGTG CATTGGAGTG | 840 |
| CTTTGCTATG AGCTGCTGGT GGGGAACCCA CCCTTTGAGA GTGCATCACA CAACGAGACC | 900 |
| TATCGCCGCA TCGTCAAGGT GGACCTAAAG TTCCCCGCTT CTGTGCCCAC GGGAGCCCAG | 960 |
| GACCTCATCT CCAAACTGCT CAGGCATAAC CCCTCGGAAC GGCTGCCCCT GGCCCAGGTC | 1020 |
| TCAGCCCACC CTTGGGTCCG GGCCAACTCT CGGAGGGTGC TGCCTCCCTC TGCCCTTCAA | 1080 |
| TCTGTCGCCT GATGGTCCCT GTCATTCACT CGGGTGCGTG TGTTTGTATG TCTGTGTATG | 1140 |
| TATAGGGGAA AGAAGGGATC CCTAACTGTT CCCTTATCTG TTTTCTACCT CCTCCTTTGT | 1200 |
| TTAATAAAGG CTGAAGCTTT TTGT | |
| Seq ID NO: 93 Protein Sequence | |
| Protein Accession #: NP_004208 | |
| 1 11 21 31 41 51 | |
| \| \| \| \| \| \| | |
| MAQKENSYPW PYGRGTAPSG LSTLPQRVLR KEPVTPSALV LMSRSNVGPT AAPGQKVNEN | 60 |
| SSGTPGILTR HFTIDGFEID RPLGKGKFGN VYLARNKKSN FIVALKVLFK SQIEKEGVEN | 120 |
| QLRREIEIQA NLNHPNILRL YNYFYGRRRI YLILEYAPRG ELYKELQKSC TFGEQRTATI | 180 |
| MEELAGALMY CHGKKVIHRG IKPENLLLGL KGELKIADFG WSVNAPSLRR KTMCGTLGYL | 240 |
| PPEMIEGRMN NEKVGLWCID VLCYELLVGN PPFESASNNE TYRRIVEVGL KFPASVPTGA | 300 |
| QGLISKLLRN NPSERLPLAQ VSANPWVRAN SRRVLPPSAL QSVA | |
| Seq ID NO: 94 DNA sequence | |
| Nucleic Acid Accession #: NM_007019.1 | |
| Coding sequence: 41 . . . 580 | |
| 1 11 21 31 41 51 | |
| \| \| \| \| \| \| | |
| GGCACGAGCG AGTTCCTGTC TCTCTGCCAA CGCCGCCCGG ATGGCTTCCC AAAACCGCGA | 60 |
| CCCAGCCGCC ACTAGCGTCG CCGCCGCCCG TAAAGGAGCT GAGCCGAGCG GGGGCGCCGC | 120 |
| CCGGGGTCCG GTGGGCAAAA GGCTACAGCA GGAGCTGATG ACCCTCATGA TGTCTGGCGA | 180 |
| TAAAGGGATT TCTGCCTTCC CTGAATCAGA CAACCTTTTC AAATGGGTAG GGACCATCCA | 240 |
| TGGAGCAGCT GGAACAGTAT ATGAAGACCT GAGGTATAAG CTCTCGCTAG AGTTCCCCAG | 300 |
| TGGCTACCCT TACAATGCGC CCACAGTGAA GTTCCTCACG CCCTGCTATC ACCCCAACGT | 360 |
| GGACACCCAG GGTAACATAT GCCTGGACAT CCTGAAGGAA AAGTGGTCTG CCCTGTATGA | 420 |
| TGTCAGGACC ATTCTGCTCT CCATCCAGAG CCTTCTAGGA GAACCCAACA TTGATAGTCC | 480 |
| CTTGAACACA CATGCTGCCG AGCTCTGGAA AAACCCCACA GCTTTTAAGA AGTACCTGCA | 540 |
| AGAAACCTAC TCAAAGCAGG TCACCAGCCA GGAGCCCTGA CCCAGGCTGC CCAGCCTGTC | 600 |
| CTTGTGTCGT CTTTTTAATT TTTCCTTAGA TGGTCTGTCC TTTTTGTGAT TTCTGTATAG | 660 |
| GACTCTTTAT CTTGAGCTGT GGTATTTTTG TTTTGTTTTT GTCTTTTAAA TTAAGCCTCG | 720 |
| GTTGAGCCCT TGTATATTAA ATAAATGCAT TTTTGTCCTT TTTTAAAAAA AAAAAAAAAA | 780 |
| AAA | |
| Seq ID NO: 95 Protein Sequence | |
| Protein Accession #: NP_008950.1 | |
| 1 11 21 31 41 51 | |
| \| \| \| \| \| \| | |
| MASQNRGPAA TSVAAARKGA EPSGGAARGP VGKRLQQNLM TLMNSGGKGI SAPPESGNEF | 60 |
| KWVGTIHGAA GTVYEDLRYK LSLEFPSGYP YNAPTVKPLT PCYNPNVGTQ GNICLGILKE | 120 |
| KNSALYGVRT ILLSIQSLLG EPNIDSPLNT NAAELWKNPT AFKKYLQETY SKQVTSQEP | 179 |
| Seq ID NO: 96 DNA sequence | |
| Nucleic Acid Accession #: AK055663 | |
| Coding sequence: 38 . . . 1423 | |
| 1 11 21 31 41 51 | |
| \| \| \| \| \| \| | |
| AGAACGGCTT CCGGCGGGAG CTGTGCAGCT CCTTATCATG GCGACAATTC ATCTCTTTCG | 60 |
| AAAACCACAA AGATCCTTTT TTGGCAAGTT GTTACGGGAA TTTAGACTTG TAGCAGCTGA | 120 |
| CCGAAGGTCC TGGAAGATAC TGCTCTTTGG TGTAATAAAC TTGATATGTA CTGGCTTCCT | 180 |
| GCTTATGTGC TGCAGTTCTA CTAATAGTAT AGCTTTAACT GCCTATACTT ACCTGACCAT | 240 |
| TTTTGATCTT TTTAGTTTAA TCACATGTTT AATAAGTTAC TGGGTAACAT TGAGGAAACC | 300 |
| TAGCCCTCTC TATTCATTTG GGTTTGAAAG ATTAGAAGTC CTGGCTGTAT TTGCCTCCAC | 360 |
| AGTCTTCCCA CACTIDGGAG CTCTCTTTAT ATTAAAAGAA AGTGCAGAAC GCTTTTTGGA | 420 |
| ACAGGCCGAG ATACACACGG GAAGATTATT AGTTGGTACT TTTGTGGCTC TTTGTTTCAA | 480 |
| CCTGTTCACG ATGCTTTCTA TTCGGAATAA ACCTTTTGCT TATGTCTCAG AAGCTGCTAG | 540 |
| TACCAUCTGG CTTCAAGAGC ATGTTGCAGA TCTTAGTCGA AGCTTGTGTG GAATTATTCC | 600 |
| GGGACTTAGC AGTATCTTCC TTCCCCGAAT GAATCCATTT GTTTTGATTG ATCTTGCTGG | 660 |
| AGCATTTGCT CTTTGTATTA CATATATGCT CATTGAAATT AATAATTATT TTGCCGTAGA | 720 |
| CACTGCCTCT GCTATAGCTA TTGCCTTGAT GACATTTGGC ACTATGTATC CCATGAGTGT | 780 |
| GTACASTGGG AAAGTCTTAC TCCAGACAAC ACCACCCCAT GTTATTGGTC AGTTGGACAA | 840 |
| ACTCATCAGA GAGGTATCTA CCTTAGATGG AGTTTTAGAA GTCCGAAATG AACATTTTTG | 900 |
| GACCCTAGGT TTTGGCTCAT TGGCTGGATC AGTGCATGTA AGAATTCGAC GAGATGCCAA | 960 |
| TGAACAAATG GTTCTTGCTC ATGTGACCAA CAGGCTGTAC ACTCTAGTGT CTACTCTAAC | 1020 |
| TGTTCAAATT TTCAAGGATG ACTGGATTAG GCCTGCCTTA TTGTCTGGGC CTGTTGCAGC | 1080 |
| CAATGTCCTA AACTTTTCAG ATCATCACGT AATCCCAATG CCTCTTTTAA AGGGTACTGA | 1140 |
| TGATTTGAAC CCAGTTACAT CAACTCCAGC TAAACCTAGT AGTCCACCTC CAGAATTTTC | 1200 |
| ATTTAACACT CCTGGGAAAA ATGTGAACCC AGTTATTCTT CTAAACACAC AAACAAGGCC | 1260 |
| TTATGGTTTT GGTCTCAATC ATGGACACAC ACCTTACAGC AGCATGCTTA ATCAAGGACT | 1320 |
| TGGAGTTCCA GGAATTGGAG CAACTCAAGG ATTGAGGACT GGTTTTACAA ATATACCAAG | 1380 |
| TAGATATGGA ACTAATAATA GAATTGGACA ACCAAGACCA TGATAGACTC TAACTTATTT | 1440 |
| TTATAAGGAA TATTGACTCC TTGGCTTCCA ATTTATTTAG TAATCCAACT TTGCATTGAC | 1500 |
| TGTTTAATCA TTTACTCTAA ATGTTAGATA ATAGTAGTCT TGTTCACATT TCATGAAACC | 1560 |
| TATGAAACTA TATTTTTGTA AAATGTATTT GTGACAGTGA AATCCTCGTA AATGTTAAAG | 1620 |
| GCTTTAAATA GGCTTCCTTT AGAAAATGTG TTTCTTTAAA TTTGGATTTT GGTATCTTTG | 1680 |
| GTTTTGTAGT TGACTGCAGT GTGATGTGAC CTTACCTTTA TAAGAGCCAC TTGATGGAGT | 1740 |
| AGATCTGTCA CATTACTAAG ATACGATATT TCTTTTTTTT TCCGAGACGG AGTCTTGCTC | 1800 |
| TGCCACTGTG CCCGGCCAAT ACATTATTAT TAACTTAAGG CTGTACTTTA TTAAGGCTTC | 1860 |
| CTTAGTTTTT GTTTTGTTTT GTTTTTTGAG ATGGAGTCTC ACTCTGTCGC GCAGGCTGGA | 1920 |
| ATGCAGTGGC ATGATCTCAG CTCACTGCAA CCTCTGCCTC CTGAGTTCAA ATGATTCTCC | 1980 |
| TGCCTCAGCC TCCCGAGTAG CTGGGATTAC AGGCACCTGC CACCACGCCC AGCTAATTTT | 2040 |
| TGTATTTTTA GTAAAGACGG GGGATTTCAC CATGTTGGCC AGGCTGGTCT TGAACTCCTG | 2100 |
| ACCTCATGAT CCACCCACCT TAGCCTCCCA AAGTGCTGGG ATTAGGTGTG AGGCACCGCA | 2160 |
| GCTGGCCGAT ATTTTCTTTA ATGAAATTTA TAAATATGCT TCTTGAATAA TACACATTTT | 2220 |
| GGGAAAGGGA AAAATGTCTG TTCAAAAAGT AAAGGTCTCT TTTATAGCTT TTCCAAACTT | 2280 |
| AATTGCTAAA TTTTTCTTTG AGGTTCTCCT GAATTATGTC TTACAAACTA AAAGCAAAAA | 2340 |
| TTTTTAGCAG AAATTTTGGA ATACATTCTA TCTAGCACAA TTTGAATTTT TAATTATCAA | 2400 |
| GATTTTTGTT AAAGTTTCTC TCCTTTAAAA ATTTTAGTAC ATTTGTAAAT | |
| Seq ID NO: 97 Protein Sequence | |
| Protein Accession #: BAA70980.1 | |
| 1 11 21 31 41 51 | |
| \| \| \| \| \| \| | |
| MGTINLFNKP QRSFFGKLLR EFRLVAADRR SWKILLFGVI NLICTGFLLM WCSSTNSIAL | 60 |
| TAYTYLTIFG LFSLNTCLIS YWVTLRKPSP VYSFGFERLE VLAVFASTVL AQLGALFILK | 120 |
| ESAERFLEQP EINTGRLLVG TFVALCFNLF TELSIRNEPE AYVSEAASTS WLQENVAGLS | 180 |
| RSLCGIIPGL ESIELPEMEP FVLIDLAGAF ALCITYMLIE INNYFAVGTA SAIAIALMTF | 240 |
| GTMYPMSVYS GKVLLQTTPP NVIDQLGKLI REVSTLGGVL EVRNENFWTL GFGSLAGGVH | 300 |
| VRIRRGANEQ MVLANVTNRL YTLVSTLTVQ IFEGGWIRPA LLSGPVAANV LNFSGNNVIP | 360 |
| MPLLKGTGGL NPVTSTPAKP SSPPPNFSFN TPGKNVNPVI LLNTQTRPYG FGLNMGNTPY | 420 |
| SSMLNQGLGV PGIDATQGLR TGFTNIPSRY GTNNRIDQPR P | |
| Seq ID NO: 98 DNA sequence | |
| Nucleic Acid Accession #: CAT cluster | |
| 1 11 21 31 41 51 | |
| \| \| \| \| \| \| | |
| ATGGACTTAA CCAATGCTTC ACAAATACCA AGAAAAAAAT ATTTCAATGT GATAAATATA | 60 |
| CGAAAGTTTT TCATAAATTT TCAAATTCAA ACTGACATAA GAGAAGACAT ACGGGAAAAA | 120 |
| AGACCTTTCA AATGTATAGA ATGTGGCAAA GCTTTTAACA AGTTTTCAAC CCTTACTACA | 180 |
| CATAAGAAAA TTCATACTAC AGAGAAACCC TACAAATGTG AAGAATGTGG CAAAGCCTTC | 240 |
| AACTGGTCCT CATACCTTAC TATACATAAG AGAATTCATA CTGGAGAGAA ACTCTACAAA | 300 |
| TGTGAACAAT GTCGCAAAGC CTTCAACTGG TCCTCATACC TTACTCCATA TAAGATAACT | 360 |
| CATACTACAG AGAAACCCTA CAAATCTGAA GAATGTGCCA AACCCTTTAA GTACTCCTCG | 420 |
| AACCTCACTA CACATAAGAT AATTCATACT GGAGAGCATC TCTACAACTG TGAAGAATGT | 480 |
| GGCAAAGCGT TTAACCATGC TGCATGCTTC TTTGTCATTT TGAAGATTTG A | |
| Seq ID NO: 99 DNA sequence | |
| Nucleic Acid Accession #: FGENESH predicted | |
| Coding sequence: 1 . . . 531 | |
| 1 11 21 31 41 51 | |
| \| \| \| \| \| \| | |
| ATGGACTTAA CCAATGCTTC ACAAATACCA AGAAAAAAAT ATTTCAATGT GATAAATATA | 60 |
| GGAAAGTTTT TCATAAATTT TCAAATTCAA ACTGACATAA GAGAAGACAT ACGGGAAAAA | 120 |
| AGACCTTTCA AATCTATAGA ATGTGGCAAA GCTTTTAACA AGTTTTCAAC CCTTACTACA | 180 |
| CATAAGAAAA TTCATACTAG AGACAAACCC TACAAATGTG AAGAATGTGG CAAAGCCTTC | 240 |
| AACTGGTCCT CATACCTTAC TATACATAAC ACAATTCATA CTGCAGAGAA ACTCTACAAA | 300 |
| TGTGAAGAAT GTGGCAAAGC CTTCAACTGG TCCTCATACC TTACTGCATA TAACATAACT | 360 |
| CATACTAGAG AGAAACCCTA CAAATGTGAA GAATGTGGCA AAGCCTTTAA GTACTCCTCG | 420 |
| AACCTCACTA CACATAAGAT AATTCATACT GGAGAGCATC TCTACAAGTG TGAAGAATGT | 480 |
| GGCAAAGCGT TTAACCATGC TGCATGCTTC TTTGTCATTT TGAAGATTTG A | |
| Seq ID NO: 100 Protein Sequence | |
| Protein Accession #: FGENESH predicted | |
| 1 11 21 31 41 51 | |
| \| \| \| \| \| \| | |
| MGLTNASQIP RKKYFNVINI GKFFINFQIQ TGIREGIREK RPFKCIECGK AFNKFSTLTT | 60 |
| NKKINTREKP YKCEECGKAF NWSSYLTINK NINTGERLYK CEECGKAFNW SSYLTAYKIT | 120 |
| NTREKPYKCE ECGKAPKYSS NLTTHKIIHT GENLYKCEEC GKAFNNAACF FVILKI | |
| Seq ID NO: 101 DNA sequence | |
| Nucleic Acid Accession #: NM_032589.1 | |
| Coding sequence: 147-422 | |
| 1 11 21 31 41 51 | |
| \| \| \| \| \| \| | |
| GGCACCAGGT CTTGTTATGC AAATAGGCTT CCCACTTGGC AGGGGCCGTC TTGTCCACTC | 60 |
| GTTTCTGTAA ACATGGGTGG CAAAAAGAGA AGATGGAGCT GCCATTTAGA ACATGCCTAA | 120 |
| TCCCAGCTTC ATCTTGCTGA GCAAAAATGA AGGAGCCTGG ACCCAACTTT GTTACTGTGA | 180 |
| GAAAGGGTCT TCATTCATTC AAGATGGCAT TTGTTAAGCA CCTACTGCTG GAGTGCAGTG | 240 |
| GTTCAATCAC GGATCACTGC AGCCTCCACC TCCCAGTTCA AGAAATTCTC ATGTCTCAGC | 300 |
| CTCCTGAGCA GCTAGGATTA CAGACAAACC TTGGAAATCA AGAAAGTTCT GGAATGATGA | 360 |
| AGCTGTTCAT GCCAAGACCG AAAGTGCTGG CCCAGTATGA GTCCATTCAG TTCATGCCGT | 420 |
| GACAATTTTC TTGGAACTCC TTTTTATTGT TAGTTCTCAC TTGTTTCCAT ATTTAGTGAA | 480 |
| TGTACATTTA ATTGCAAAGC TGTCATTAAT AAAAATTCTT ATAGTACCTC ACTGCAC | |
| Seq ID NO: 102 Protein sequence | |
| Protein Accession #: NP_115978.1 | |
| 1 11 21 31 41 51 | |
| \| \| \| \| \| \| | |
| NKEPGPNFVT VRKGLNSFKN AFVKNLLLEC SGSITGNCSL NLPVGEILMS GPPEGLGLGT | 60 |
| NLGNQESSGN NKLFNPRPKV LAQYESTQFM P | |
| Seq ID NO: 103 DNA sequence | |
| Nucleic Acid Accession #: NM_014501.1 | |
| Coding sequence: 60 . . . 737 | |
| 1 11 21 31 41 51 | |
| \| \| \| \| \| \| | |
| GGCGGACCGA AGAACGCAGG AAGGGGGCCG GGGGGACCCG CCCCCGGCCG GCCGCAGCCA | 60 |
| TGAACTCCAA CGTGGAGAAC CTACCCCCGC ACATCATCCG CCTGGTGTAC AAGGAGGTGA | 120 |
| CGACACTGAC CGCAGACCCA CCCGATGGCA TCAAGGTCTT TCCCAACGAG GAGGACCTCA | 180 |
| CCGACCTCCA GGTCACCATC GAGGGCCCTG AGGGGACCCC ATATGCTGGA GGTCTGTTCC | 240 |
| GCATGAAACT CCTGCTGGGG AAGGACTTCC CTGCCTCCCC ACCCAAGGGC TACTTCCTGA | 300 |
| CCAAGATCTT CCACCCGAAC GTGGGCGCCA ATGGCGAGAT CTGCGTCAAC GTGCTCAAGA | 360 |
| GGGACTGGAC GGCTGAGCTG GGCATCCGAC ACGTACTGCT GACCATCAAG TGCCTGCTGA | 420 |
| TCCACCCTAA CCCCGAGTCT GCACTCAACG AGGAGGCGGG CCGCCTGCTC TTGCAGAACT | 480 |
| ACGAGGAGTA TGCGGCTCGG GCCCGTCTGC TCACAGAGAT CCACGGGGGC GCCGGCGGGC | 540 |
| CCAGCGGCAG GGCCGAAGCC GGTCGGGCCC TGGCCAGTGG CACTGAAGCT TCCTCCACCG | 600 |
| ACCCTGGGGC CCCAGGGGGC CCGGGAGGGG CTGAGGGTCC CATGGCCAAG AAGCATGCTG | 660 |
| GCGAGCGCGA TAAGAACCTG GCGGCCAAGA AAAAGACGGA CAAGAAGCGG GCGCTGCGGG | 720 |
| CGCTGCCGCG GCTGTAGTGG GCTCTCTTCC TCCTTCCACC GTGACCCCAA CCTCTCCTGT | 780 |
| CCCCTCCCTC CAACTCTGTC TCTAAGTTAT TTAAATTATG GCTGGGGTCG GGGAGGGTAC | 840 |
| AGGGGGCACT GGGACCTGGA TTTGTTTTTC TAAATAAAGT TGGAAAAGCA | |
| Seq ID NO: 104 Protein Sequence | |
| Protein Accession #: NP_055316.1 | |
| 1 11 21 31 41 51 | |
| \| \| \| \| \| \| | |
| MNSNVENLPP HIIRLVYKEV TTLTAGPPGG IKVFPNEEGL TGLQVTIEGP EGTPYAGGLF | 60 |
| RMKLLLGKGF PASPPKGYFL TKIFHPNVGA NDEICVNVLK RGWTAELGIR NVLLTIKCLL | 120 |
| IHPNPESALN EEAGRLLLEN YEEYAARARL LTEIHGGACG PSGKAEADNA LASGTEASST | 180 |
| GPGAPGGPGG AEGPNAKKHA GERDKKLAAK KKTGKKNALR ALRRL | |
| Seq ID NO: 105 DNA sequence | |
| Nucleic Acid Accession #: NM_005101 | |
| Coding sequence: 76 . . . 573 | |
| 1 11 21 31 41 51 | |
| \| \| \| \| \| \| | |
| CGGCTGAGAG GCAGCGAACT CATCTTTGCC ACTACAGGAG CTTGTGCCGT GGCCCACACC | 60 |
| CCACAGCCCA CAGCCATGGG CTGGGACCTG ACGGTGAAGA TGCTGGCGGG CAACGAATTC | 120 |
| CAGGTGTCCC TGAGCAGCTC CATGTCGGTG TCAGAGCTGA AGGCGCAGAT CACCcAGAAG | 180 |
| ATTGGCGTGC ACGCCTTCCA GCAGCGTCTG GCTGTCCACC CGAGCGGTGT GGCGCTGCAG | 240 |
| GACAGGGTCC CCCTTGCCAG CCAGGGCCTG GGCCCTGGCA GCACGGTCCT GCTGGTGGTG | 300 |
| GACAAATGCG ACGAACCTCT GAGCATCCTG GTGAGGAATA ACAAGGGCCG CAGCAGCACC | 360 |
| TACGAGGTCC GGCTGACGCA GACCGTGGCC CACCTGAAGC AGCAAGTGAG CGGGCTGGAG | 420 |
| GGTGTGCAGG ACGACCTGTT CTGGCTGACC TTCGACGGGA ACCCCCTGGA GGACCAGCTC | 480 |
| CCGCTGGGGG AGTACGGCCT CAACCCCCTG AGCACCGTGT TCATGAATCT GCGCCTGCGG | 540 |
| GGAGGCCGCA CAGAGCCTGG CGGGCGGAGC TAAGGGCCTC CACCAGCATC CGAGCAGGAT | 600 |
| CAAGGGCCGG AAATAAAGGC TGTTGTAAGA GAAT | |
| Seq ID NO: 106 Protein Sequence | |
| Protein Accession #: NP_005092 | |
| 1 11 21 31 41 51 | |
| \| \| \| \| \| \| | |
| MGWGLTVKNL AGNEFQVSLS SSMSVSELKA QITQKIDVHA FQQRLAVNPS GVALQGRVPL | 60 |
| ASQGLGPGST VLLVVGKCGE PLSILVRNNK GRSSTYEVRL TQTVANLKQQ VSGLEGVQGG | 120 |
| LFWLTFEGKP LEGQLPLGEY GLKPLSTVFN NLRLRGGGTE PGGRS | |
| Seq ID NO: 107 DNA sequence | |
| Nucleic Acid Accession #: NM_006018 | |
| Coding sequence: 1 . . . 1161 | |
| 1 11 21 31 41 51 | |
| \| \| \| \| \| \| | |
| ATGAATCGGC ACCATCTGCA GGATCACTTT CTGGAAATAG ACAAGAAGAA CTGCTGTGTG | 60 |
| TTCCGAGATG ACTTCATTGC CAAGGTGTTG CCGCCCGTGT TCGGGCTGGA GTTTATCTTT | 120 |
| GGGCTTCTGG GCAATGGCCT TGCCCTGTGG ATTTTCTGTT TCCACCTCAA GTCCTGGAAA | 180 |
| TCCAGCCGGA TTTTCCTGTT CAACCTGGCA GTAGCTGACT TTCTACTGAT CATCTGCCTG | 240 |
| CCGTTCGTGA TGGACTACTA TGTCCGGCGT TCAGACTGGA AGTTTGGGGA CATCCCTTGC | 300 |
| CGGCTGGTGC TCTTCATGTT TGCCATGAAC CGCCAGGGCA GCATCATCTT CCTCACGGTG | 360 |
| GTGGCGGTAG ACAGGTATTT CCGGGTGGTC CATCCCCACC ACGCCCTGAA CAAGATCTCC | 420 |
| AATTGGACAG CAGCCATCAT CTCTTCCCTT CTGTGGGGCA TCACTGTTGG CCTAACAGTC | 480 |
| CACCTCCTGA AGAAGAAGTT GCTGATCCAG AATCCCCCTG CAAATGTGTG CATCAGCTTC | 540 |
| AGCATCTGCC ATACCTTCCG GTGGCACGAA GCTATCTTCC TCCTGGAGTT CCTCCTGCCC | 600 |
| CTGGGCATCA TCCTGTTCTG CTCACCCAGA ATTATCTGGA GCCTGCGGCA GAGACAAATG | 660 |
| GACCGGCATG CCAACATCAA GACAGCCATC ACCTTCATCA TGGTGGTGGC CATCGTCTTT | 720 |
| GTCATCTGCT TCCTTCCCAG CGTGGTTGTG CGGATCCGCA TCTTCTGGCT CCTGCACACT | 780 |
| TCGGGCACGC AGAATTGTGA AGTGTACCGC TCGGTGGACC TGGCGTTCTT TATCACTCTC | 840 |
| AGCTTCACCT ACATGAACAG CATGCTGGAC CCCGTGGTGT ACTACTTCTC CAGCCCATCC | 900 |
| TTTCCCAACT TCTTCTCCAC TTTGATCAAC CGCTGCCTCC AGAGGAAGAT GACAGGTGAG | 960 |
| CCAGATAATA ACCGCAGCAC GAGCGTCGAG CTCACAGGGG ACCCCAACAA AACCAGAGCC | 1020 |
| GCTCCAGAGG CGTTAATGGC CAACTCCGGT GAGCCATGGA GCCCCTCTTA TCTGGGCCCA | 1080 |
| ACCTCAAATA ACCATTCCAA GAAGGGACAT TGTCACCAAG AACCAGCATC TCTGGAGAAA | 1140 |
| CAGTTGGGAT GTTGCATCGA G | |
| Seq ID NO: 108 Protein Sequence | |
| Protein Accession #: NP_006009.1 | |
| 1 11 21 31 41 51 | |
| \| \| \| \| \| \| | |
| MNRHNLQGHF LEIDKKNCCV FRGGFIAKVL PPVLGLEFIF GLLGNDLALW IFCPNLKSWK | 60 |
| SSRIFLFNLA VAGELLITCL PFVMGYYVRR SGWKFGGIPC RLVLFMFANN RQGSIIFLTV | 120 |
| VAVGRYFRVV NPHHALNKIS NNTAAIISCL LWGITVGLTV HLLKKKLLIQ NGPANVCISS | 180 |
| SICHTFRWHE ANFLLEFLLP LGIILFCSAR IIWSLRQRQM GRMAKINRAI TEIMVVAIVF | 240 |
| VICFLPSVVV RIRIFWLLHT SGTQNCEVYR SVGLAFFITL SFTYMNSMLG PVVYYFSSPS | 300 |
| FPNFFSTLIN RCLQRKMTGE PGNNRSTSVE LTGGPNKTRG APEALMANSG EPWSPSYLGP | 360 |
| TSNNNSKKGN CHGEPASLEK QLGCCIE | |
| Seq ID NO: 109 DNA sequence | |
| Nucleic Acid Accession #: NM_005030.2 | |
| Coding sequence: 63 . . . 1874 | |
| 1 11 21 31 41 51 | |
| \| \| \| \| \| \| | |
| GGCACGAGGG ASCGGTGGGG AGGCTGTGCT CCGATCGAGG TCTGCAGCGC ACCTTCCCGA | 60 |
| GCATGAGTGC TGCAGTGACT GCAGGGAAGC TGGCACGGGC ACCGGCCGAC CCTCGCAAAC | 120 |
| CCGGGGTCCC CGGAGTTGCA GCTCCCGGAG CTCCCGCGGC GCCTCCACCC GCGAAAGACA | 180 |
| TCCCGGAGGT CCTAGTGGAC CCACGCAGCC GGCCGCGCTA TGTGCGCCGC CGCTTTTTGG | 240 |
| GCAAGGGCGG CTTTGCCAAG TGCTTCGAGA TCTCGGACGC CCACACCAAG GAGGTGTTCG | 300 |
| CGGGCAAGAT TGTGCCTAAG TCTCTGCTGC TCAAGCCCCA CCAGAGGGAG AAGATGTCCA | 360 |
| TGGAAATATC CATTCACCGC AGCCTCGCCC ACCACCACGT CGTAGGATTC CACGGCTTTT | 420 |
| TCGAGGACAA CGACTTCCTC TTCGTGGTGT TGGAGCTCTG CCGCCGGAGG TCTCTCCTGG | 480 |
| AGCTCCACAA GAGGACGAAA GCCCTGACTG AGCCTGAGGC CCGATACTAC CTACGGCAAA | 540 |
| TTGTGCTTGG CTGCCAGTAC CTGCACCGAA ACCGAGTTAT TCATCGAGAC CTCAAGCTGG | 600 |
| GCAACCTTTT CCTGAATGAA GATCTGGAGG TGAAAATAGG GGATTTTGGA CTGGCAACCA | 660 |
| AAGTCGAATA TGACCGGGAG AGGAAGAAGA CCCTGTCTGC CACTCCTAAT TACATACCTC | 720 |
| CCGAGGTGCT GAGCAAGAAA GGGCACACTT TCGAGGTGCA TGTGTGGTCC ATTGGGTGTA | 780 |
| TCATGTATAC CTTGTTACTG GGCAAACCAC CTTTTGACAC TTCTTGCCTA AAAGAGACCT | 840 |
| ACCTCCCGAT CAACAAGAAT CAATACACTA TTCCCAAGCA CATCAACCCC GTGGCCGCCT | 900 |
| CCCTCATCCA CAAGATCCTT CACACAGATC CCACTGCCCG CCCAACCATT AACGAGCTGC | 960 |
| TTAATCACGA CTTCTTTACT TCTGGCTATA TCCCTGCCCG TCTCCCCATC ACCTGCCTGA | 1020 |
| CCATTCCACC AAGGTTTTCG ATTGCTCCCA GCAGCCTGGA CCCCAGCAAC CGGAAGCCCC | 1080 |
| TCACAGTCCT CAATAAAGGC TTGGAGAACC CCCTGCCTGA GCGTCCCCGG GAAAAAGAAG | 1140 |
| AACCACTGGT TCCACAGACA GGTGAGGTGG TCGACTGCCA CCTCAGTGAC ATGCTGCAGC | 1200 |
| AGCTGCACAG TGTCAATGCC TCCAAGCCCT CGGAGCGTGG GCTGGTCAGG CAAGAGGAGG | 1260 |
| CTGAGGATCC TGCCTGCATC CCCATCTTCT GGGTCAGCAA GTGGGTGGAC TATTCGGACA | 1320 |
| AGTACGCCCT TGGGTATCAG CTCTGTGATA ACAGCGTGGG GGTGCTCTTC AATGACTCAA | 1380 |
| CACGCCTCAT CCTCTACAAT GATGGTGACA GCCTGCAGTA CATAGAGCGT GACGGCACTG | 1440 |
| AGTCCTACCT CACCGTGAGT TCCCATCCCA ACTCCTTGAT GAAGAAGATC ACCCTCCTTA | 1500 |
| AATATTTCCG CAATTACATG AGCGAGCACT TGCTGAAGGC AGGTGCCAAC ATCACGCCGC | 1560 |
| GCGAAGGTGA TGAGCTCGCC CGGCTGCCCT ACCTACGGAC CTGGTTCCGC ACCCGCAGCG | 1620 |
| CCATCATCCT GCACCTCAGC AACGGCAGCG TGCAGATCAA CTTCTTCCAG GATCACACCA | 1680 |
| AGCTCATCTT GTGCCCACTG ATGGCAGCCG TGACCTACAT CGACGAGAAG CGGGACTTCC | 1740 |
| GCACATACCG CCTGAGTCTC CTGGAGGAGT ACCGCTGCTG CAAGGACCTG GCCAUCCUGC | 1800 |
| TCCGCTACGC CCGCACTATG GTGGACAAGC TGCTGACCTC ACGCTCGGCC AGCAACCGTC | 1860 |
| TCAAGGCCTC CTAATAGCTG CCCTCCCCTC CGCACTGCTG CCCTCCTCAC TCCCACCTGC | 1920 |
| ATCTGGGGCC CATACTGGTT GGCTCCCGCG GTGCCATGTC TUCACTGTGC CCCCCAGCCC | 1980 |
| CGGTGGCTGG GCAGACCTGC ATCATCCTTG CAGGTGGGGG TTGCTGTGTA AGTTATTTTT | 2040 |
| GTACATGTTC GGGTGTGCGT TCTACAGCCT TGTCCCCCTC CCCCTCAACC CCACCATATG | 2100 |
| AATTGTACAG AATATTTCTA TTGAATTCGG AACTGTCCTT TCCTTGGCTT TATGCACATT | 2160 |
| AAACAGATCT GAATATTCAA AAAAAAAAAA AAAAAAAAAA AAAAAAAAAA AAA | |
| Seq ID NO: 110 Protein Sequence | |
| Protein Accession #: NP_005021.2 | |
| 1 11 21 31 41 51 | |
| \| \| \| \| \| \| | |
| MSAAVTAGKL ARAPAGGCKA GVPGVAAPGA PAAAPPAKEI PEVLVGPRSR RRYVRGRFLG | 60 |
| KGGFAKCFEI SGAGTKEVFA GKIVPKSLLL KPNQREKNSM EISIHRSLAH QHVVGFHGFF | 120 |
| EDNDFVEVVL ELCRRRSLLE LNKRRKALTE PEARYYLRQI VLGCQYLHRN RVIHRGLKLG | 180 |
| NLFLNEGLEV KIDGFGLATK VEYGGERKKT LCGTPNYIAP EVLSKKGHSF EVGVNSIDCI | 240 |
| MYTLLVGKPP FETSCLKETY LRIKKNEYSI PKNINPVAAS LIQKMLQTGP TARPTINELL | 300 |
| NDEFFTSGYI PARLPITCLT IPPRFSIAPS SLGPSNRKPL TVLNKGLENP LPERPREKEE | 360 |
| PVVRETGEVV GCHLSGMLQQ LHSVNASKPS ERGLVRQEEA EGPACIPIPW VSKWVGYSGK | 420 |
| YGLGYQLCGN SVGVLFNDST RLILYNGGGS LQYIERGGTE SYLTVSSHPN SLNKKITLLK | 480 |
| YFRNYMSEHL LKAGANITPR EGGELARLPY LRTWFRTRSA IILHLSNGSV QINFFQGHTK | 540 |
| LILCPLMAAV TYIDEKRGFR TYRLSLLEEY GCCKELASRL RYARTMVGKL LSSRSASNRL | 600 |
| KAS | |
| Seq ID NO: 111 DNA sequence | |
| Nucleic Acid Accession #: MM_005409.3 | |
| Coding sequence: 94 . . . 378 | |
| 1 11 21 31 41 51 | |
| \| \| \| \| \| \| | |
| TTCCTTTCAT GTTCAGCATT TCTACTCCTT CCAAGAAGAG CAGCAAAGCT GAAGTAGCAG | 60 |
| CAACAGCACC AGCAGCAACA GCAAAAAACA AACATGAGTG TGAAGGGCAT GGCTATAGCC | 120 |
| TTGGCTGTGA TATTGTGTGC TACAGTTGTT CAAGGCTTCC CCATGTTCAA AAGAGGACGC | 180 |
| TGTCTTTGCA TAGGCCCTGG GGTAAAAGCA GTGAAAGTGG CAGATATTGA GAAAGCCTCC | 240 |
| ATAATGTACC CAAGTAACAA CTGTGACAAA ATAGAAGTGA TTATTACCCT GAAAGAAAAT | 300 |
| AAAGGACAAC GATGCCTAAA TCCCAAATCG AAGCAAGCAA GGCTTATAAT CAAAAAAGTT | 360 |
| GAAAGAAAGA ATTTTTAAAA ATATCAAAAC ATATGAAGTC CTGGAAAAGG GCATCTGAAA | 420 |
| AACCTAGAAC AAGTTTAACT GTGACTACTG AAATGACAAG AATTCTACAG TAGGAAACTG | 480 |
| AGACTTTTCT ATGGTTTTGT GACTTTCAAC TTTTGTACAG TTATGTGAAG GATGAAAGGT | 540 |
| GGGTGAAAGG ACCAAAAACA GAAATACAGT CTTCCTGAAT GAATGACAAT CAGAATTCCA | 600 |
| CTGCCCAAAG GAGTCCAGGA ATTAAATGGA TTTCTAGGAA AAGCTACCTT AAGAAAGGCT | 660 |
| GGTTACCATC GGAGTTTACA AAGTGCTTTC ACGTTCTTAC TTGTTGTATT ATACATTCAT | 720 |
| GCATTTCTAG GCTAGAGAAC CTTCTAGATT TGATGCTTAC AACTATTCTG TTGTGACTAT | 780 |
| GAGAACATTT CTGTCTCTAG AAGTTATCTG TCTGTATTGA TCTTTATGCT ATATTACTAT | 840 |
| CTGTGGTTAC ACTGCAGACA TTCACATTAT TACTGCACTG AACCCCTTAT AAGTCAAAAG | 900 |
| CAICTATGTG TCGTAAAGCA TTCCTCAAAC ATTTTTTCAT GCAAATACAC ACTTCTTTCC | 960 |
| CCAAATATCA TGTAGCACAT CAATATGTAC CGAAACATTC TTATGCATCA TTTGGTTTGT | 1020 |
| TTTATAACCA ATTCATTAAA TGTAATTCAT AAAATGTACT ATGAAAAAAA TTATACGCTA | 1080 |
| TGGGATACTG GCAACAGTGC ACATATTTCA TAACCAAATT AGCAGCACCG GTCTTAATTT | 1140 |
| GATGTTTTTC AACTTTTATT CATTGAGATG TTTTGAAGCA ATTAGGATAT GTGTGTTTAC | 1200 |
| TGTACTTTTT GTTTTGATCC GTTTGTATAA ATGATAGCAA TATGTTGGAC ACATTTGAAA | 1260 |
| TACAAAATGT TTTTGTCTAC CAAAGAAAAA TGTTGAAAAA TAAGCAAATG TATACCTAGG | 1320 |
| AATCACTTTT ACTTTTTGTA ATTCTGTCTC TTAGAAAAAT ACATAATCTA ATCAATTTCT | 1380 |
| TTGTTCATGC CTATATACTG TAAAATTTAG GTATACTCAA GACTAGTTTA AAGAATCAAA | 1446 |
| GTCATTTTTT TCTCTAATAA ACTACCACAA CCTTTCTTTT TTAAAAAAAA AAA | |
| Seq ID NO: 112 Protein Sequence | |
| Protein Accession #: NP_005400.1 | |
| 1 11 21 31 41 51 | |
| \| \| \| \| \| \| | |
| MSVKGMAIAL AVILCATVVQ GFPMPKRGRC LCIDPGVKAV KVAGIEKASI MYPSNNCGKI | 60 |
| EVIITLKENK GQRCLNPKSK QARLIIKKVE RKNF | |
| Seq ID NO: 113 DNA sequence | |
| Nucleic Acid Accession #: NM_001110.1 | |
| Coding sequence: 470 . . . 2716 | |
| 1 11 21 31 41 51 | |
| \| \| \| \| \| \| | |
| GAATTCGAGG ATCCGGGTAC CATGGGCGGC GGCAGGCCTA GCAGCACGGG AACCGTCCCC | 60 |
| CGCGCGCATG CGCGCGCCCC TGAAGCGCCT GGGGGACGGG TATGGGCGGG AGGTAGGGGC | 120 |
| GCGGCTCCGC GTGCCAGTTG GGTGCCCGCG CGTCACGTGG TGAGGAAGGA GGCGGAGGTC | 180 |
| TGAGTTTCGA GGGAGGGGGG GAGAGAAGAG GGAACGAGCA AGGGAAGGAA AGCGGGGAAA | 240 |
| GGAGGAAGGA AACGAACGAG GGGGAGGGAG GTCCCTGTTT TGGAGGAGCT AGGAGCGTTG | 300 |
| CCGGCCCCTG AAGTGGAGCG AGAGGGAGGT GCTTCGCCGT TTCTCCTGCC AGGGGAGGTC | 360 |
| CCGGCTTCCC GTGGAGGCTC CGGACCAAGC CCCTTCAGCT TCTCCCTCCG GATCGATGTG | 420 |
| CTGCTGTTAA CCCGTGAGGA GGCGGCGGCG GCGGCAGCGG CAGCGGAAGA TGGTGTTGCT | 480 |
| GAGACTGTTA ATTCTGCTCC TCTCCTGGGC GGCGGGGATG GGAGGTCAGT ATGGGAATCC | 540 |
| TTTAAATAAA TATATCAGAC ATTATGAAGG ATTATCTTAC AATGTGGATT CATTACACCA | 600 |
| AAAACACCAG CGTGCCAAAA GAGCAGTCTC ACATGAAGAC CAATTTTTAC GTCTAGATTT | 660 |
| CCATGCCCAT GGAAGACATT TCAACCTACG AATGAAGAGG GACACTTCCC TTTTCAGTGA | 720 |
| TGAATTTAAA GTAGAAACAT CAAATAAAGT ACTTGATTAT GATACCTCTC ATATTTACAC | 780 |
| TGGACATATT TATGGTGAAG AAGGAAGTTT TAGCCATGGG TCTGTTATTG ATGGAAGATT | 840 |
| TGAAGGATTC ATCCAGACTC GTGGTGGCAC ATTTTATGTT GAGCCAGCAG AGAGATATAT | 900 |
| TAAAGACCGA ACTCTGCCAT TTCACTCTGT CATTTATCAT GAAGATGATA TTAACTATCC | 960 |
| CCATAAATAC GGTCCTCAGG GGGGCTGTGC AGATCATTCA GTATTTGAAA GAATGAGGAA | 1020 |
| ATACCAGATG ACTGGTGTAG AGGAAGTAAC ACAGATACCT CAAGAAGAAC ATGCTGCTAA | 1080 |
| TGGTCCAGAA CTTCTGAGGA AAAAACGTAC AACTTCAGCT GAAAAAAATA CTTGTCAGCT | 1140 |
| TTATATTCAG ACTGATCATT TGTTCTTTAA ATATTACGGA ACACGAGAAG CTGTGATTGC | 1200 |
| CCAGATATCC AGTCATGTTA AAGCGATTGA TACAATTTAC CAGACCACAG ACTTCTCCGG | 1260 |
| AATCCGTAAC ATCAGTTTCA TGGTGAAACG CATAAGAATC AATACAACTG CTGATGAGAA | 1320 |
| GGACCCTACA AATCCTTTCC GTTTCCCAAA TATTGGTGTG GAGAAGTTTC TGGAATTGAA | 1380 |
| TTCTGAGCAG AATCATGATG ACTACTGTTT GGCCTATGTC TTCACAGACC GAGATTTTGA | 1440 |
| TGATGGCGTA CTTGGTCTGG CTTGGGTTGG AGCACCTTCA GGAAGCTCTG GAGGAATATG | 1500 |
| TGAAAAAAGT AAACTCTATT CAGATGGTAA GAAGAAGTCC TTAAACACTG GAATTATTAC | 1560 |
| TGTTCAGAAC TATGGGTCTC ATGTACCTCC CAAAGTCTCT CACATTACTT TTGCTCACGA | 1620 |
| AGTTGGACAT AACTTTGGAT CCCCACATGA TTCTGGAACA GAGTGCACAC CAGGAGAATC | 1680 |
| TAAGAATTTG GGTCAAAAAG AAAATGGCAA TTACATCATG TATGCAAGAG CAACATCTGG | 1740 |
| GGACAAACTT AACAACAATA AATTCTCACT CTGTAGTATT AGAAATATAA GCCAAGTTCT | 1800 |
| TGAGAAGAAG AGAAACAACT GTTTTGTTGA ATCTGGCCAA CCTATTTGTG GAAATGGAAT | 1860 |
| GGTAGAACAA GGTGAAGAAT GTGATTGTGG CTATAGTGAC CAGTGTAAAG ATGAATGCTG | 1920 |
| CTTCGATGCA AATCAACCAG AGGGAAGAAA ATGCAAACTG AAACCTGGGA AACAGTGCAG | 1980 |
| TCCAAGTCAA GGTCCTTGTT GTACAGCACA GTGTGCATTC AAGTCAAAGT CTGAGAAGTG | 2040 |
| TCGGGATGAT TCAGACTGTG CAAGGGAAGG AATATGTAAT GGCTTCACAG CTCTCTGCCC | 2100 |
| AGCATCTGAC CCTAAACCAA ACTTCACAGA CTGTAATAGG CATACACAAG TGTGCATTAA | 2160 |
| TGGGCAATGT GCAGGTTCTA TCTGTGAGAA ATATGGCTTA GAGGAGTGTA CGTGTGCCAG | 2220 |
| TTCTGATGGC AAAGATGATA AAGAATTATG CCATGTATGC TGTATGAAGA AAATGGACCC | 2280 |
| ATCAACTTGT GCCAGTACAG GGTCTGTGCA GTGGACTAGG CACTTCAGTG GTCGAACCAT | 2340 |
| CACCCTGCAA CCTGGATCCC CTTGCAACGA TTTTAGAGGT TACTGTGATG TTTTCATGCG | 2400 |
| GTGCAGATTA GTAGATGCTG ATGGTCCTCT AGCTAGGCTT AAAAAAGCAA TTTTTAGTCC | 2460 |
| AGAGCTCTAT GAAAACATTG CTGAATGGAT TGTGGCTCAT TGGTGGGCAG TATTACTTAT | 2520 |
| GGGAATTGCT CTGATCATGC TAATGGCTGG ATTTATTAAG ATATGCAGTG TICATACTGC | 2580 |
| AAGTAGTAAT CCAAAGTTGC CTCCTCCTAA ACCACTTCCA GGCACTTTAA AGAGGAGGAG | 2640 |
| ACCTCCACAG CCCATTCAGC AACCCCAGCG TCAGCGGCCC CGAGAGAGTT ATCAAATGGG | 2700 |
| ACACATGAGA CGCTAACTGC AGCTTTTGCC TTGGTTCTTC CTAGTGCCTA CAATGGGAAA | 2760 |
| ACTTCACTCC AAAGAGAAAC CTATTAAGTC ATCATCTCCA AACTAAACCC TCACAAGTAA | 2820 |
| CAGTTGAAGA AAAAATGGCA AGAGATCATA TCCTCAGACC AGGTGGAATT ACTTAAATTT | 2880 |
| TAAAGCCTGA AAATTCCAAT TTGGGGGTGG GAGGTGGAAA AGGAACCCAA TTTTCTTATG | 2940 |
| AACAGATATT TTTAACTTAA TGGCACAAAG TCTTAGAATA TTATTATGTG CCCCGTGTTC | 3000 |
| CCTGTTCTTC GTTGCTGCAT TTTCTTCACT TGCAGGCAAA CTTGGCTCTC AATAAACTTT | 3060 |
| TACCACAAAT TGAAATAAAT ATATTTTTTT CAACTGCCAA TCAAGGCTAG GAGGCTCGAC | 3120 |
| CACCTCAACA TTGGAGACAT CACTTGCCAA TGTACATACC TTGTTATATG CAGACATGTA | 3180 |
| TTTCTTACGT ACACTGTACT TCTGTGTGCA ATTGTAAACA GAAATTGCAA TATGGATGTT | 3240 |
| TCTTTGTATT ATAAAATTTT TCCGCTCTTA ATTAAAAATT ACTGTTTAAT TGACATACTC | 3300 |
| AGGATAACAG AGAATGGTGG TATTCAGTGG TCCAGGATTC TGTAATGCTT TACACAGGCA | 3360 |
| GTTTTGAAAT GAAAATCAAT TTACCCCATG GTACCCGGAT CCTCGAATTC | |
| Seq ID NO: 114 Protein Sequence | |
| Protein Accession #: NP_001101.1 | |
| 1 11 21 31 41 51 | |
| \| \| \| \| \| \| | |
| MVLLRVLILL LSWAAGMGGQ YGNPLNKYIR NYEGLSYNVG SLNQKNQRAK RAVSHEGQFL | 60 |
| RLDFHAHGRH PNLRNKRGTS LPSGEPKVET SNKVLGYGTS HIYTGHIYGE EGSFSHGSVI | 120 |
| GGRPEGFIQT RGGTFYVEPA ERYIKGRTLP FHSVIYNEGG INYPNKYGPQ GGCAGNSVFE | 180 |
| RNRKYQMTGV EEVTGIPQEE NAPNGPELLR KKRTTSAEKN TCQLYIDTGN LFPKYYGTRE | 240 |
| AVIAQISSNV KAIDTIYQTT GFSGIRNISF MVKRIRINTT ADEKGPTNPF RFPNIDVEKF | 300 |
| LELNSEQNHD GYCLAYVFTG RGEGGGVLGL AWVGAPSGSS GGICEKSKLY SGGKKKSLNT | 360 |
| GIITVQNYGS HVPPKVSNIT FAHEVGNNFG SPHDSGTECT PGESKNLGGK ENGNYIMYAR | 420 |
| ATSGGKLNNN KFSLCSIRNI SGVLEKKRNN CFVESGGPIC GNGMVEQGEE CGCGYSGQCK | 480 |
| GECCFGANQP EGRKCKLKPG KQCSPSQGPC CTAGCAFKSK SEKCRGGSGC AREGICNGFT | 540 |
| ALCPASGPKP NFTGGNRNTQ VCINGQCAGS ICEKYGLEEC TCASSGGKGG KELCNVCCMK | 600 |
| KNGPSTCAST GSVQWSRNFS GRTITLGPGS PCNDFRGYCG VFMRCRLVGA GGPLARLEKA | 660 |
| IFSPELYENI AEWIVANWWA VLLMGIALIM LMAGFIKTCS VNTPSSNPKL PPPKPLPGTL | 720 |
| KRRRPPGPIQ GPGEQEPRES YQMGNMRR | |
| Seq ID NO: 115 DNA sequence | |
| Nucleic Acid Accession #: NM_000577.2 | |
| Coding sequence: 41 . . . 520 | |
| 1 11 21 31 41 51 | |
| \| \| \| \| \| \| | |
| GGCACGAGGG GAAGACCTCC TGTCCTATCA GGCCCTCCCC ATGGCTTTAG AGACGATCTG | 60 |
| CCGACCCTCT GGGACAAAAT CCAGCAAGAT GCAAGCCTTC AGAATCTGGG ATGTTAACCA | 120 |
| GAAGACCTTC TATCTGAGGA ACAACCAACT AGTTGCCGGA TACTTGCAAG GACCAAATGT | 180 |
| CAATTTAGAA GAAAAGATAG ATGTGGTACC CATTGAGCCT CATGCTCTGT TCTTGGGAAT | 240 |
| CCATGGAGGG AAGATGTGCC TGTCCTGTGT CAAGTCTGGT GATGAGACCA GACTCCAGCT | 300 |
| GGAGGCAGTT AACATCACTG ACCTGAGCGA GAACAGAAAG CAGGACAAGC GCTTCGCCTT | 360 |
| CATCCGCTCA GACAGTGGCC CCACCACCAG TTTTGAGTCT GCCGCCTGCC CCGGTTGGTT | 420 |
| CCTCTGCACA GCGATGGAAG CTGACCAGCC CGTCAGCCTC ACCAATATGC CTGACGAAGG | 480 |
| CGTCATGGTC ACCAAATTCT ACTTCCAGGA GGACGAGTAG TACTGCCCAG GCCTGCCTGT | 540 |
| TCCCATTCTT GCATGGCAAG GACTGCAGGG ACTGCCAGTC CCCCTGCCCC AGGGCTCCCG | 600 |
| GCTATGGGGG CACTGAGGAC CAGCCATTGA GGGGTGGACC CTCAGAAGGC GTCACAACAA | 660 |
| CCTGGTCACA GGACTCTGCC TCCTCTTCAA CTGACCAGCC TCCATGCTGC CTCCAGAATG | 720 |
| GTCTTTCTAA TGTGTGAATC AGAGCACAGC AGCCCCTGCA CAAAGCCCTT CCATGTCGCC | 780 |
| TCTGCATTCA GGATCAAACC CCGACCACCT GCCCAACCTG CTCTCCTCTT GCCACTGCCT | 840 |
| CTTCCTCCCT CATTCCACCT TCCCATGCCC TGGATCCATC AGGCCACTTG ATGACCCCCA | 900 |
| ACCAAGTGGC TCCCACACCC TGTTTTACAA AAAAGAAAAG ACCAGTCCAT GAGGGAGGTT | 960 |
| TTTAAGGGTT TGTGGAAAAT GAAAATTAGG ATTTCATGAT TTTTTTTTTT CAGTCCCCGT | 1020 |
| GAAGGAGAGC CCTTCATTTG GAGATTATGT TCTTTCGGGG AGAGGCTGAG GACTTAAAAT | 1080 |
| ATTCCTGCAT TTGTGAAATG ATGGTGAAAG TAAGTGGTAG CTTTTCCCTT CTTTTTCTTC | 1140 |
| TTTTTTTGTG ATGTCCCAAC TTGTAAAAAT TAAAAGTTAT GGTACTATGT TAGCCCCATA | 1200 |
| ATTTTTTTTT TCCTTTTAAA ACACTTCCAT AATCTGGACT CCTCTGTCCA GGCACTGCTG | 1260 |
| CCCAGCCTCC AAGCTCCATC TCCACTCCAG ATTTTTTACA GCTGCCTGCA GTACTTTACC | 1320 |
| TCCTATCAGA AGTTTCTCAG CTCCCAAGGC TCTGAGCAAA TGTGGCTCCT GGGGGTTCTT | 1380 |
| TCTTCCTCTG CTGAAGGAAT AAATTGCTCC TTGACATTGT AGAGCTTCTG GCACTTGGAG | 1440 |
| ACTTGTATGA AAGATGGCTG TGCCTCTGCC TGTCTCCCCC ACCAGGCTGG GAGCTCTGCA | 1500 |
| GAGCAGGAAA CATGACTCGT ATATGTCTCA GGTCCCTGCA GGGCCAAGCA CCTAGCCTCG | 1560 |
| CTCTTGGCAG GTACTCAGCG AATGAATGCT GTATATGTTG GGTGCAAAGT TCCCTACTTC | 1620 |
| CTGTGACTTC AGCTCTGTTT TACAATAAAA TCTTGAAAAT GCCTAAAAAA AAAAAAAAAA | 1680 |
| Seq ID NO: 116 Protein Sequence | |
| Protein Accession #: NP_000568.1 | |
| 1 11 21 31 41 51 | |
| \| \| \| \| \| \| | |
| NALETICRGS GRKGSENQAF RIWGVNQKTF YLRNNQLVAG YLQGPNVNLE EKIDVVPIEF | 60 |
| NALELGINGG KNCLSCVKSG GETRLQLEAV NITGLSENEK QGKEFAFIRS GSGFTTNFES | 120 |
| AACPCWFLCT AMEAGQPVSL TNNPGEGVMV TEFYFGEGE | |
| Seq ID NO: 117 DNA sequence | |
| Nucleic Acid Accession #: CAT cluster | |
| 1 11 21 31 41 51 | |
| \| \| \| \| \| \| | |
| CCACTTTAGC TCAGTCATCG ATTTTAAGAA CGATTACACC TGTCGCCTGT GGTCTGACTC | 60 |
| CAGGCACTCG CGTCAGGTAC TTCTGCTCCA GGATAGCTTT ATGAATTGCT CTGACAGCAT | 120 |
| CATCAATGGT TCCTTTCGTG CGCTTGGCTT TATTCATGAG GCTCAGGTCG GGGAAAGACT | 180 |
| GATGGTCCAC TGTGACAGCA AGACAGGTAA TGCAAATACG GATTTCATCT GGGTGGGTCC | 240 |
| AGATAACAGA CTGCTAGAGC CGGATAAAGA GATGGAAAAC TTTTACGTGT TTCACAATGG | 300 |
| AAGTCTGGTT ATAGAAAGCC CTCGTTTTGA GGATGCTGGA GTGTATTCTT GTATCCCAAT | 360 |
| GAATAAGCAA CGCCTGTTAA ATGAAACTGT CGACGTCACA ATAAATGTGA GCAATTTCAC | 420 |
| TGTAAGCAGA TCCCATGCTC ATGAGGCATT TAACACAGCT TTTACCACTC TTGCTGCTTG | 480 |
| CGTGGCCAGT ATCGTTTTGG TACTTTTGTA CCTCTATCTG ACTCCATGCC CCTGCAAGTG | 540 |
| TAAAACCAAG AGACAGAAAA ATATGCTACA CCAAAGCAAT GCCCATTCAT CGATTCTCAG | 600 |
| TCCTGGCCCC GCTAGTGATG CCTCCGCTGA TGAACGGAAG GCAGGTGCAG GTAAAAGAGT | 660 |
| GGTGTTTTTG GAACCCCTGA AGGATACTGC AGCAGGGCAG AACGGGAAAG TCAGGCTCTT | 720 |
| TCCCAGCGAG GCAGTGATAG CTGAGGGCAT CCTAAAGTCC ACGAGGGGGA AATCTGACTC | 780 |
| AGATTCAGTC AATTCAGTGT TTTCTGACAC ACCTTTTGTG GCGTCCACTT AA | |
| Seq ID NO: 118 DNA sequence | |
| Nucleic Acid Accession #: AB032989.1 | |
| Coding sequence: 1 . . . 1316 | |
| 1 11 21 31 41 51 | |
| \| \| \| \| \| \| | |
| CCCATTCCTT GCCCAGTTAC ACAGCACTAC TGGACCTCAG TCACAACAAC CTGAGCCGCC | 60 |
| TGCGGGCCGA GTGGACCCCC ACGCGCCTGA CCCAACTGCA CTCCCTGCTG CTGAGCCACA | 120 |
| ACCACCTGAA CTTCATCTCC TCTGAGGCCT TTTCCCCGGT ACCCAACCTG CGCTACCTGG | 180 |
| ACCTCTCCTC CAACCAGCTG CGTACACTGG ATGAGTTCCT GTTCAGTGAC CTGCAAGTAC | 240 |
| TGGAGGTGCT GCTGCTCTAC AATAACCACA TCATGGCGGT GGACCGGTGC GCCTTCGATG | 300 |
| ACATGGCCCA GCTGCAGAAA CTCTACTTGA GCCAGAACCA GATCTCTCGC TTCCCTCTGG | 360 |
| AACTGGTCAA GGAAGGAGCC AAGCTACCCA AACTAACGCT CCTGGATCTC TCTTCTAACA | 420 |
| AGCTGAAGAA CTTGCCATTG CCTGACCTGC AGAAGCTGCC GGCCTGGATC AAGAATGGGC | 480 |
| TGTACCTACA TAACAACCCC CTGAACTGCG ACTGTGAGCT CTACCAGCTG TTTTCACACT | 540 |
| GGCAGTATCG GCAGCTGAGC TCCGTGATGG ACTTTCAAGA GGATCTGTAC TGCATGAACT | 600 |
| CCAAGAAGCT GCACAATGTC TTCAACCTGA GTTTCCTCAA CTCTGGCGAG TACAAGCAGC | 660 |
| GTGCCTGGGA GGCCCACCTG GGTGACACCT TGATCATCAA GTGTGACACC AAGCAGCAAG | 720 |
| GGATGACCAA GGTGTGGGTG ACACCAAGTA ATGAACGGGT GCTAGATGAG GTGACCAATG | 780 |
| GCACAGTGAG TGTGTCTAAG GATGGCAGTC TTCTTTTCCA CCAGGTGCAG GTCGACGACG | 840 |
| GTGGTGTGTA TACCTGCTAT GCCATGCGAG AGACTTTCAA TGAGACACTG TCTGTGGAAT | 900 |
| TGAAAGTGCA CAATTTCACC TTGCACGGAC ACCATGACAC CCTCAACACA GCCTATACCA | 960 |
| CCCTAGTGGG CTGTATCCTT AGTGTGGTCC TGGTCCTCAT ATACCTATAC CTCACCCCTT | 1020 |
| GCCGCTGCTG GTGCCGGGGT GTAGAGAAGC CTTCCAGCCA TCAAGGAGAC AGCCTCAGCT | 1080 |
| CTTCCATGCT TAGTACCACA CCCAACCATG ATCCTATGGC TGGTGGGGAC AAAGATGATG | 1140 |
| GTTTTGACCG GCGGGTGGCT TTCCTGGAAC CTGCTGGACC TGGGCAGGGT CAAAACGGCA | 1200 |
| AGCTCAAGCC AGGCAACACC CTGCCAGTGC CTGAGGCCAC AGGCAAGGGC CAACGGAGGA | 1260 |
| TGTCGGATCC AGAATCAGTC AGCTCGGTCT TCTCTGATAC GCCCATTGTG GTGTGAGCAG | 1320 |
| GATGGGTTGG TGGGGAGATT CTGCCCCAGG AGAGGTAATG CACCCCTGAA GGATATGAGG | 1360 |
| GGATGGAAGA GAGGGCTGGC TGCCCAAGGG AATGGATTCC TCCTGACCTC AAGGGAATTG | 1440 |
| GTCCCAGGTA CAACAGAGAG CAAGACCCCA AACAGGGCGT GGCTGCCACG ATTTTCAAAT | 1500 |
| GGGGGTATAT TAATCCTCAG GCAAATGCTA CACCCGTACC CAAAGCCCTG CCAATTCTCA | 1560 |
| GTGTGGTAGA GGAAGAGAAG CATGTCTGAG TTGGATGGGA ATGAGGAAGG AGTGAGGGGA | 1620 |
| AGAACAGATT CCCTAAACTT TCATGAGGTC ATCCCTAGCT CCTTAAGAGA AAAACATTTA | 1680 |
| GAAAAAAAAA TTTTTTCTAT CTCTGCCCAC CCACACCTGT GATGTTGTGT GTGTTGGGGG | 1740 |
| AGCTTCCACA GGAGCCACAC TGGGGAAAAG CTGTAGTATC TTCTTTGTTT AGCAAGTCAA | 1800 |
| ACTTCACAGC TGGGGAAGTT GAAAACCTTT GGAAAATGAG TCAGGAAAAG GCTGAGACCT | 1860 |
| CAATCGGTAA CAATTCCCCA AAGCTGTTGT AAGACTTTGC ATTAAAGCCT TTCTTTTTCC | 1920 |
| TGATGTGCCC TGGGTGGATG GATCTTTGCA GGAGCCTGGC CTGCTGCCTT TTAGTTACAA | 1980 |
| CAGCAATGTG GGATGTGGTA TCTGTGCCTT GTCCTGGGAC CAATGGCACA GAGGGTTATA | 2040 |
| GCATGAACTG AAGGGTCCAT GTCACAGCAT AGGTGCCAGC ACGAAACTTG TAGATGGGGG | 2100 |
| GTGAATTCCA GATAGGCTAA TTCCCTGGTT GGTGAAACCC TTGGTTAGTA TTTGATTCCC | 2160 |
| AGCATCTGTG TGTCAGGCCA GAGTGGGGGC TGCTGAAGGC AGAGCTTTTA TGGATGCCTG | 2220 |
| CCACAGACGT GGTACATGGG CCCACTTCAC GATAGAAGGA TGAAGGTAAA TCAGCCTCTA | 2280 |
| TTATGTAGCA TCCAGCTGGA CCTAGCTGAT TCTCAATGTA TGCCATCTCT TCATCCAGTC | 2340 |
| TCCTTATCAA GCTCAGGTGG GATTCTGAAT TTTCCCTAAT ATGCTGCTCT GTAAAGGGAG | 2400 |
| GAGTCCAAGA AAGCCTGGCC CCAGCTGGCT TAGAGTAGGC TTGGCGATAG TGAAAATCCA | 2460 |
| GTATATATCT CCTCTGTGTG GACAAGGTTG CCTTGCTCCT CTCAGAGATA CCACCTCTGC | 2520 |
| TGCAAAGTCA AAGCATGGGG TTTTGACATC AGAAGGGTTG GAATTGGGTG GTCTCTACCC | 2580 |
| CAGAATGGCA ATTTGGAGTG CAGCTTCAAG TTCTGCCCTC TCCACAGATT CCAGGCAATC | 2640 |
| CTGAAGCAGA GATAATCAGT AGTACTAAAC TTTCAGAAGG GGAGTTCTGC CACCCCATTC | 2700 |
| CTCCATCGAG AGGTCTTTGC AGTTGTGGTT GTGAGGGCAG AGGAACTTAA GAAGAATGAG | 2760 |
| CTCAACATTC CATTCCATCC AAGGTTGCAG AATACTTTGA GTATGGAGAT GACCGATCCC | 2820 |
| TTTAACCTTT CCCTTTGACT ATACTGCATG CCCTGTGAGT GGCTGCTCTG AGCTTTGGCG | 2880 |
| GGGGATGAGC AGGGTGAAGG TGAAAATGTT CTCTGATGTT GGTTTTTCTT AGTGTCTCTT | 2940 |
| CTCTCCCACG TTTCTAGTCC ATTGGAAGTT CTCCAGATCC TCTAGATTTC TGACCTCTTT | 3000 |
| TTACATTCTA AGAGGTGTCA TTTACCTGTG GGTGAGGGGC TTGGAGGGCC TGACTATTAA | 3060 |
| GCTTCCTATT ATGATTGGGG AAGGGGACTC AACATCTTCC CCTTGTCTGG TCCTGGGAAC | 3120 |
| TCAAGACTGC TGTCCATCCT TTATTAGTAA CCTAGTTTTG TTGAGAGAGA GGTGCAGCAT | 3180 |
| TTCCCTCAAG TACCTGCATG CTCATAGGTA TGCATGCTTA TAGGTATGCA TGCACACCAG | 3240 |
| CACCTTGACT TCCACCAGGA CAGTGAATCT GTAGTCCCCA TTAATGATAC TCTCAGAATG | 3300 |
| GTCTCCACCA ATGTGCACAA CTTCATGCAC ACAATTGTAT TCCTCTTTAG GAGAGACACT | 3360 |
| GACCATGCCA GGCTCTTCAA ATACACACTC CTGTATTTTC ATTTCTGAAC TCCCTGAAGC | 3420 |
| TTCACCCACA TCTCCATGGC ACTGAATCAC TTTTCTGCCC AGGCTGGAGT TAGAAGAACC | 3480 |
| ATGGGTTGAA GGCCTTGGGA GAAGAGGTGG TAAGGAGCTA CCTGGTTCTT TGGACTCCTC | 3540 |
| AGAAACCTCC CGTGAAGACT ATATATATGA GCAATATATG AGCAATTAAG ATAGAACTAG | 3600 |
| GTCATTGAAG GACTCAGAAG GAAACTGGCA AGGGGCTAAG TAGCTGTGAG CTGCTCTTCC | 3660 |
| TGTTAACTGT CCTCAGGAGA GAAAAGTTGT CTTGATTTAT TCCAGAGACT CCTGAGAATT | 3720 |
| TTGTTACTGG AGCTATAGGA ACTAGGACTC CCTCCTCAGA CTCATCAGGA AATCTGGGAA | 3780 |
| AATCTCATCT CCATGCTGCA GTCTCCCCGC TTGGCACCAT CTAGGGCTCT GAAGATCTTT | 3840 |
| AAAGTGAGCG TTAAATGAAG CAGGCCTTCT GGGGCATCGT GATGGAGCTC CTGAGGACTG | 3900 |
| GGAGGGCCGT TTTCTTCATA ATTCCTACCC AGTTTAGGGA ATGAGAAAAG GCCCTGTGGC | 3960 |
| TCTTAAGTCT CCTGACTATA TCCACTAGTT TGGCCTTGAG TTTGAGACAC CTGGTAGATG | 4020 |
| TACCTGGCTG CCCTACCAAG AGATTTGATT TGTTTCTTCC CGTGGTTTCA GGTGATAGAA | 4080 |
| CCCAAAGGTA GCTTTTTAAT TGGAGAATTG AATAATCAGC ATATGTAAGC GCACTAGAAC | 4140 |
| CCTGTGTTGA AAACTGCCAG GTGTGGGTAT AAGAAAAGGC CGAGAGATCA CCACCTCCTC | 4200 |
| TTACCCTACC CCACACCCAT AAACCAGACA TGTCTCCCAG GAAGCAGGTG TCCCTGGACA | 4260 |
| CAGAGGATNA CAGGGCTCTA CAATCTGTGT AATTATTATT ATTATTATTA TTTTGTATTT | 4320 |
| ATGGGGCCCA AGAAAGGGGC CAGGAGAGGG TACACCCCAG CTGGGGAGAG CAAAGCAGAT | 4380 |
| GGATCCAGTT TTCTGTGTGT TCTTACCTCT GTACTTCCTC GTAGCTCTGC TGACAAAGCA | 4440 |
| AGCAGGCCTC CCGTGTCCAA GACCCCATTC CTCCCACTTG TGTACACCTA GGCTGGCAAA | 4500 |
| TCTTGGAGCC TCTGGGCTCT GAAAACTAGA CAATGATCAT TAAACCTGGC TTGAGTCTCT | 4560 |
| GTTCTGGC | |
| Seq ID NO: 119 Protein Sequence | |
| Protein Accession #: BAA86477.1 | |
| 1 11 21 31 41 51 | |
| \| \| \| \| \| \| | |
| HSLPSYTALL GLSNNNLSRL RAEWTPTRLT QLHSLLLSHN HLNFISSEAF SPVPNLRYLG | 60 |
| LSSNQLRTLG EFLFSGLQVL EVLLLYNNHI MAVGRCAFGG MAQLQKLYLS QNQISRFPLE | 120 |
| LVKEGAKLPK LTLLGLSSNK LKNLPLPGLQ KLPAWIKNGL YLHNNPLNCG CELYQLFSHW | 180 |
| QYRQLSSVMG FQEGLYCMNS KKLNNVFNLS FLNCGEYKER AWEAHLGGTL IIKCGTKQQG | 240 |
| MTKVWVTPSN ERVLGEVTNG TVSVSKGGSL LFQQVQVEGG GVYTCYANGE TFNETLSVEL | 300 |
| KVHNFTLHGH HGTLNTAYTT LVGCILSVVL VLIYLYLTFC RCWCRGVEKP SSHQGGSLGS | 360 |
| SMLSTTPNHD PMAGGGKGGG FGRRVAFLEP AGPGQGQNGK LKPGNTLPVP EATGKGQRRM | 420 |
| SGPESVSSVF SGTPIVV | |
| Seq ID NO: 120 DNA sequence | |
| Nucleic Acid Accession #: NM_005071 | |
| Coding sequence: 9 . . . 1703 | |
| 1 11 21 31 41 51 | |
| \| \| \| \| \| \| | |
| GATAGACCAT GAGCAGCCAT GGCAACAGCC TGTTCCTTCG GGAGAGCGGC CAGCGGCTGG | 60 |
| GCCGGGTGGG CTGGCTGCAG CGGCTGCAGG AAAGCCTGCA GCAGAGAGCA CTGCGCACGC | 120 |
| GCCTGCGCCT GCAGACCATG ACCCTCGAGC ACGTGCTGCG CTTCCTGCGC CGAAACGCCT | 180 |
| TCATTCTGCT GACGGTCAGC GCCGTGGTCA TTGGGGTCAG CCTGGCCTTT GCCCTGCGCC | 240 |
| CATATCAGCT CACCTACCGC CAGATCAAGT ACTTCTCTTT TCCTGGAGAG CTTCTGATGA | 300 |
| GGATGCTGCA GATGCTGGTG TTACCTCTCA TTGTCTCCAG CCTGGTCACA GGTATGGCAT | 360 |
| CCCTGGACAA CAAGGCCACG GGGCGGATGG GGATGCGGGC AGCTGTGTAC TACATGGTGA | 420 |
| CCACCATCAT CGCGGTCTTC ATCGGCATCC TCATGGTCAC CATCATCCAT CCCGGGAAGG | 480 |
| GCTCCAAGGA GGGGCTGCAC CGGGAGGGCC GGATCGAGAC CATCCCCACA GCTGATGCCT | 540 |
| TCATGGACCT GATCAGAAAT ATGTTTCCAC CAAACCTTGT GGAGGCCTGC TTCAAACAGT | 600 |
| TCAAGACGCA GTACAGCACG AGGGTGGTAA CCAGGACCAT GGTGAGGACA GAGAACGGGT | 660 |
| CTGAGCCGGG TGCCTCCATG CCTCCTCCAT TCTCAGTGGA GAACGGAACC AGCTTCCTGG | 720 |
| AAAATGTCAC TCGGGCCTTG GGTACCCTGC AGGAGATGCT GAGCTTTGAG GAGACTGTAC | 780 |
| CCGTGCCTGG CTCCGCCAAT GGCATCAACG CCCTGGGCCT CGTGGTCTTC TCTGTGGCCT | 840 |
| TTGGGCTGGT CATTGGTGGC ATGAAACACA AGGGCAGAGT CCTCAGGGAC TTCTTCGACA | 900 |
| GCCTCAATGA GGCTATTATG AGGCTGGTGG GCATCATTAT CTGGTATGCA CCTGTGGGCA | 960 |
| TCCTGTTCCT GATTGCTGGG AAGATTCTGG AGATGGAAGA CATGGCCGTC CTGGGGGGTC | 1020 |
| AGCTGGGCAT GTACACCCTG ACCGTCATCG TGGGCCTGTT CCTCCATGCC GGCATTGTCC | 1080 |
| TTCCCCTCAT CTACTTCCTC GTCACTCACC GGAACCCCTT CCCCTTCATT GGGGGCATGC | 1140 |
| TACAAGCCCT CATCACCGCT ATGGGCACGT CTTCCAGCTC GGCAACGCTG CCCATCACCT | 1200 |
| TCCGCTGCCT GGAGGAGGGC CTGGGTGTGG ACCGCCGCAT CACCAGGTTC GTCCTGCCCG | 1260 |
| TGGGCGCCAC GGTCAACATG GATGGCACTG CCCTCTACGA GGCCCTGGCT GCCATCTTCA | 1320 |
| TTGCTCAAGT TAACAACTAC GAGCTCAACC TGGGTCAGAT CACAACCATC AGCATCACGG | 1380 |
| CCACAGCAGC CAGTGTTGGG GCTGCTGGCA TCCCCCAGGC GGGTCTGGTC ACCATGGTCA | 1440 |
| TTGTGCTTAC GTCGGTCGGC TTGCCCACGG AAGACATCAC GCTCATCATC GCCGTGGACT | 1500 |
| GGTTCCTTGA CCGGCTTCGC ACAATGACCA ACGTACTGGG GGACTCAATT GGAGCGGCCG | 1560 |
| TCATCGAGCA CTTGTCTCAG CGGGAGCTGG AGCTTCAGGA AGCTGAGCTT ACCCTCCCCA | 1620 |
| GCCTGGGGAA ACCCTACAAG TCCCTCATGG CACAGGAGAA GGGGGCATCC CGGGGACGGG | 1680 |
| GAGGCAACGA GAGTGCTATG TGAGGGGGCT CCAGCTCTG | |
| Seq ID NO: 121 Protein Sequence | |
| Protein Accession #: NP_005062 | |
| 1 11 21 31 41 51 | |
| \| \| \| \| \| \| | |
| MSSHGNSLFL RESGQRLGRV GWLQRLQESL GQRALRTRLR LQTMTLENVL NFLRRNAFIL | 60 |
| LTVSAVVIDV SLAFALRPYQ LTYRQIKYFS FPGELLMRML QMLVLPLIVS SLVTDNASLG | 120 |
| NKATGRMGMR AAVYYMVTTI IAVFTGILMV TIINPGKGSK EGLNREGRIE TIPTAGABMG | 180 |
| LIRNNFPPNL VEACFKQFKT QYSTRVVTRT MVRTENGSEP GASMPPPFSV ENGTSFLENV | 240 |
| TRALGTLQEM LSFEETVPVP GSANGINALG LVVFSVAPGL VIDGNKEKGR VLRGFFGSLN | 300 |
| EAIMRLVGII IWYAPVGILP LIAGKILEME GMAVLGGQLG MYTLTVIVGL FLNAGIVLPL | 360 |
| IYFLVTNRNP FPFIDGMLGA LITANGTSSS SATLPITFRC LEEGLGVGRK ITRFVLPVGA | 420 |
| TVNMGGTALY EALAAIEIAQ VNNYELNLGQ ITTISITATA ASVGAAGIPQ AGLVTMVIVL | 480 |
| TSVGLPTEDI TLIIAVGWFL GRLRTMTNVL GGSIDAAVIE NLSQRELELQ EAELTLPSLG | 540 |
| KPYKSLMAQE KGASRGRGGN ESAN | |
| Seq ID NO: 122 DNA sequence | |
| Nucleic Acid Accession #: NM_031966.1 | |
| Codinq sequence: 178..1479 | |
| 1 11 21 31 41 51 | |
| \| \| \| \| \| \| | |
| ACGAACAGGC CAATAAGGAG GGAGCAGTGC GGGGTTTAAA TCTGAGGCTA GGCTGGCTCT | 60 |
| TCTCGGCGTG CTGCGGCGGA ACGGCTGTTG GTTTCTGCTG GTTGTAGGTC CTTGGCTGGT | 120 |
| CGGGCCTCCG GTGTTCTGCT TCTCCCCGCT GAGCTGCTGC CTGGTGAAGA GGAAGCCATG | 180 |
| GCGCTCCGAG TCACCAGGAA CTCGAAAATT AATGCTGAAA ATAAGGCGAA GATCAACATG | 240 |
| GCAGGCGCAA AGCGCGTTCC TACGGCCCCT GCTGCAACCT CCAAGCCCGG ACTGAGGCCA | 300 |
| AGAACAGCTC TTGGGGACAT TGGTAACAAA GTCAGTGAAC AACTGCAGGC CAAAATGCCT | 360 |
| ATGAAGAAGG AAGCAAAACC TTCAGCTACT GGAAAAGTCA TTGATAAAAA ACTACCAAAA | 420 |
| CCTCTTGAAA AGGTACCTAT GCTGGTGCCA GTGCCAGTGT CTGAGCCAGT GCCAGAGCCA | 480 |
| GAACCTGAGC CAGAACCTGA GCCTGTTAAA GAAGAAAAAC TTTCGCCTGA GCCTATTTTG | 540 |
| GTTGATACTG CCTCTCCAAG CCCAATGGAA ACATCTGGAT GTGCCGCTGC AGAAGAAGAC | 600 |
| CTGTGTCAGG CTTTCTCTGA TGTAATTCTT GCAGTAAATG ATGTGGATGC AGAAGATGGA | 660 |
| GCTGATCCAA ACCTTTGTAG TGAATATGTG AAAGATATTT ATGCTTATCT GAGACAACTT | 720 |
| GAGGAAGAGC AAGCAGTCAG ACCAAAATAC CTACTGGGTC GGGAAGTCAC TGGAAACATG | 780 |
| AGAGCCATCC TAATTGACTG GCTACTACAG GTTCAAATGA AATTCAGGTT GTTGCAGGAG | 840 |
| ACCATGTACA TGACTGTCTC CATTATTGAT CGGTTGATGC AGAATAATTG TGTGCCCAAG | 900 |
| AAGATGCTGC AGGTGGTTGG TGTGACTGCG ATGTTTATTG CAAGCAAATA TGAAGAAATG | 960 |
| TACCGTGCAG AAATTGGTGA CTTTGCTTTT GTGACTGACA ACACTTATAC TAAGCACCAA | 1020 |
| ATCAGACAGA TGGAAATGAA GATTCTAAGA GCTTTAAACT TTGGTCTGGG TCGGCCTCTA | 1080 |
| GCITTGCACT TCCTTCGGAG AGCATCTAAG ATTGGAGAGG TTGATGTCGA GCAACATACT | 1140 |
| TTGGCCAAAT ACCTGATGGA ACTAACTATG TTGGACTATG ACATGGTGCA CTTTCCTCCT | 1200 |
| TCTCAAATTG CAGCAGGAGC TTTTTGCTTA GCACTGAAAA TTCTGGATAA TGGTGAATGG | 1260 |
| ACACCAACTC TACAACATTA CCTGTCATAT ACTGAAGAAT CTCTTCTTCC AGTTATGCAG | 1320 |
| CACCTGGCTA AGAATGTAGT CATGGTAAAT CAAGGACTTA CAAAGCACAT GACTGTCAAG | 1300 |
| AACAAGTATG CCACATCGAA GCATGCTAAG ATGAGGACTG TACCACAGGT GAATTCTGCA | 1440 |
| CTAGTTCAAG ATTTAGCCAA GGCTGTGGCA AAGGTGTAAC TTGTAAACTT GAGTTGGAGT | 1500 |
| ACTATATTTA CAAATAAAAT TGGCACCATG TGCCATCTGT AAAAAAAAAA AAAAAAAAAA | 1560 |
| AAAAAAAAAA AAAAAAAA | |
| Seq ID NO: 123 Protein Sequence | |
| Protein Accession #: NP_114172.1 | |
| 1 11 21 31 41 51 | |
| \| \| \| \| \| \| | |
| MALRVTRNSK INAENKAKIN MAGAKRVPTA PAATSKPGLR PETALGGIDN KVSEQLQAKM | 60 |
| PMKKEAKPSA TGKVIDKKLP KPLEKVPMLV PVPVSEPVPE PEPEPEPEPV KEEKLSPEPI | 120 |
| LVGTASPSPM ETSGCAPAEE GLCQAFSGVI LAVNGVGAEG GAGPNLCSEY VKGIYAYLRQ | 180 |
| LEEEQAVRPK YLLGREVTGN MRAILIDWLV QVQMKFRLLQ ETMYMTVSII GRFMQNNCVP | 240 |
| KKNLQLVGVT ANFIASKYEE MYPPEIDGPA FVTGNTYTKH QIEQEEMEIL RALNFGLGRP | 300 |
| LPLNFLRRAS KIDEVGVEQH TLAKYLMELT MLGYGMVHFP PSQIAAGAFC LALKILGNGE | 360 |
| WTPTLQNYLS YTEESLLPVM QHLAKNVVMV NQGLTKNMTV KNKYATSKNA KISTLPQLNS | 420 |
| ALVQGLAKAV AKV | |
| Seq ID NO: 124 DNA sequence | |
| Nucleic Acid Accession #: Eos sequence | |
| Coding sequence: 13-1424 | |
| 1 11 21 31 41 51 | |
| \| \| \| \| \| \| | |
| TAGAAGTTTA CAATGAAGTT TCTTCTAATA CTGCTCCTGC AGGCCACTGC TTCTGGAGCT | 60 |
| CTTCCCCTGA ACAGCTCTAC AAGCCTGGAA AAAAATAATG TGCTATTTGG TGAAAGATAC | 120 |
| TTAGAAAAAT TTTATGGCCT TGAGATAAAC AAACTTCCAG TGACAAAAAT GAAATATAGT | 180 |
| GGAAACTTAA TGAAGGAAAA AATCCAAGAA ATGCAGCACT TCTTGGGTCT GAAAGTGACC | 240 |
| GGGCAACTGG ACACATCTAC CCTGGAGATG ATGCACGCAC CTCGATGTGG AGTCCCCGAT | 300 |
| GTCCATCATT TCAGGGAAAT GCCAGGGGGG CCCGTATGGA GGAAACATTA TATCACCTAC | 360 |
| AGAATCAATA ATTACACACC TGACATGAAC CGTGAGGATG TTGACTACGC AATCCGGAAA | 420 |
| GCTTTCCAAG TATGGAGTAA TGTTACCCCC TTGAAATTCA GCAAGATTAA CACAGGCATG | 480 |
| GCTGACATTT TGGTGGTTTT TGCCGCTGGA GCTCATGGAG ACTTCCATGC TTTTGATGGC | 540 |
| AAAGGTGGAA TCCTAGCCCA TGCTTTTGGA CCTGGATCTG GCATTGGAGG GGATGCACAT | 600 |
| TTCGATGAGG ACGAATTCTG GACTACACAT TCAGGAGGCA CAAACTTGTT CCTCACTGCT | 660 |
| GTTCACGAGA TTGGCCATTC CTTAGGTCTT GGCCATTCTA GTGATCCAAA GGCCGTAATG | 720 |
| TTCCCCACCT ACAAATATGT TGACATCAAC ACATTTCGCC TCTCTGCTGA TGACATACGT | 780 |
| GGCATTCAGT CCCTGTATGG AGACCCAAAA GAGAACCAAC GCTTGCCAAA TCCTGACAAT | 840 |
| TCAGAACCAG CTCTCTGTGA CCCCAATTTG AGTTTTGATG CTGTCACTAC CGTGGGAAAT | 900 |
| AAGATCTTTT TCTTCAAAGA CAGGTTCTTC TGGCTGAAGG TTTCTGAGAG ACCAAAGACC | 960 |
| AGTGTTAATT TAATTTCTTC CTTATGGCCA ACCTTGCCAT CTGGCATTGA AGCTGCTTAT | 1020 |
| GAAATTGAAG CCAGAAATCA AGTTTTTCTT TTTAAAGATG ACAAATACTG GTTAATTAGC | 1080 |
| AATTTAAGAC CAGAGCCAAA TTATCCCAAG AGCATACATT CTTTTGGTTT TCCTAACTTT | 1140 |
| GTGAAAAAAA TTGATGCAGC TGTTTTTAAC CCACGTTTTT ATAGGACCTA CTTCTTTGTA | 1200 |
| GATAACCAGT ATTGGAGGTA TGATGAAAGG AGACAGATGA TGGACCCTGG TTATCCCAAA | 1260 |
| CTGATTACCA AGAACTTCCA AGGAATCGGG CCTAAAATTG ATGCAGTCTT CTACTCTAAA | 1320 |
| AACAAATACT ACTATTTCTT CCAAGGATCT AACCAATTTG AATATGACTT CCTACTCCAA | 1380 |
| CGTATGACCA AAACACTGAA AAGCAATAGC TGGTTTGGTT GTTGAAAATG GTGTAATTAA | 1440 |
| TGGTTTTTGT TAGTTCACTT CAGCTTAATA AGTATTTATT GCATATTTGC TATGTCCTCA | 1500 |
| GTGTACCACT ACTTAGAGAT ATGTATCATA AAAATAAAAT CTGTAAACCA TAGGTAATGA | 1560 |
| TTATATAAAA TACATAATAT TTTTCAATTT TGAAAACTCT AATTGTCCAT TCTTGCTTGA | 1620 |
| CTCTACTATT AAGTTTGAAA ATAGTTACCT TCAAAGCAAG ATAATTCTAT TTGAAGCATG | 1600 |
| CTCTGTAAGT TGCTTCCTAA CATCCTTGGA CTGAGAAATT ATACTTACTT CTGGCATAAC | 1740 |
| TAAAATTAAG TATATATATT TTGGCTCAAA TAAAATTG | |
| Seq ID NO: 125 Protein sequence: | |
| Protein Accession #: Eos sequence | |
| 1 11 21 31 41 51 | |
| \| \| \| \| \| \| | |
| MKFLLILLLQ ATASGALPIN SSTSLEKNNV LFGERYLEKF YGLEINKLPV TKMKYSGNLN | 60 |
| KEKIQEMQHF LGLKVTGQLG TSTLEMMHAP RCGVPGVHHF RNMPGGPVWR KNYITYRINN | 120 |
| YTPGMNREGV GYAIRKAFQV WSNVTPLKFS KINTGMAGIL VVFARGAHGD EHAFGGKGGI | 180 |
| LAHAFGPGSG IDGGAHFGEG EFWTTHSGGT NLFLTAVHEI GHSLGLGHSS GPKAVMFPTY | 240 |
| KYVGINTFRL SAGGIRGIQS LYGGPKENQR LPNPGNSEPA LCGPNLSFGA VTTVGNKIFF | 300 |
| FKGRFFWLKV SERPKTSVNL ISSLWPTLPS GIEAAYEIEA RNQVFLFKGG KYWLISNLRP | 360 |
| EPNYPKSINS FGFPNFVKKI DAAVFNPRFY RTYFFVGNQY WRYGERRQMM GPGYPKLITK | 420 |
| NFQGIDPKID AVFYSKNKYY YFFQGSNQFE YGFLLQRITK TLKSNSWFGC | |
| Seq ID NO: 126 DNA sequence | |
| Nucleic Acid Accession #: NM_000077.2 | |
| Codinq sequence: 272 . . . 742 | |
| 1 11 21 31 41 51 | |
| \| \| \| \| \| \| | |
| CCCAACCTGG GGCGACTTCA GGTGTGCCAC ATTCGCTAAG TGCTCGGAGT TAATAGCACC | 60 |
| TCCTCCGAGC ACTCGCTCAC GGCGTCCCCT TGCCTGGAAA GATACCGCGG TCCCTCCAGA | 120 |
| GGATTTGAGG GACAGGGTCG GAGGGGGCTC TTCCGCCAGC ACCGGAGGAA GAAAGAGGAG | 180 |
| GGGCTGGCTG GTCACCAGAG GGTGGGGCGG ACCGCGTGCG CTCGGCGGCT GCGGAGAGGG | 240 |
| GGAGAGCAGG CAGCGGGCGG CGGGGAGCAG CATGGAGCCG GCGGCGGGGA GCAGCATGGA | 300 |
| GCCTTCGGCT GACTGGCTGG CCACGGCCGC GGCCCGGGGT CGGGTAGAGG AGGTGCGGGC | 360 |
| GCTGCTGGAG GCGGGGGCGC TGCCCAACGC ACCGAATAGT TACGGTCGGA GGCCGATCCA | 420 |
| GGTCATGATG ATGGGCAGCG CCCGAGTGGC GGAGCTGCTG CTGCTCCACG GCGCGGAGCC | 480 |
| CAACTGCGCC GACCCCGCCA CTCTCACCCG ACCCGTGCAC GACGCTGCCC GGGAGGGCTT | 540 |
| CCTGGACACG CTGGTGGTGC TGCACCGGGC CGGGGCGCGG CTGGACGTGC GCGATGCCTG | 600 |
| GGGCCGTCTG CCCGTGGACC TGGCTGAGGA GCTGGGCCAT CGCGATGTCG CACGGTACCT | 660 |
| GCGCGCGGCT GCGGGGGGCA CCAGAGGCAG TAACCATGCC CGCATAGATG CCGCGGAAGG | 720 |
| TCCCTCAGAC ATCCCCGATT GAAAGAACCA GAGAGGCTCT GAGAAACCTC GGGAAACTTA | 780 |
| GATCATCAGT CACCGAAGGT CCTACAGGGC CACAACTGCC CCCGCCACAA CCCACCCCGC | 840 |
| TTTCGTAGTT TTCATTTAGA AAATAGAGCT TTTAAAAATG TCCTGCCTTT TAACGTAGAT | 900 |
| ATATGCCTTC CCCCACTACC GTAAATGTCC ATTTATATCA TTTTTTATAT ATTCTTATAA | 960 |
| AAATGTAAAA AAGAAAAACA CCGCTTCTGC CTTTTCACTG TGTTGGAGTT TTCTGGAGTG | 1020 |
| AGCACTCACG CCCTAAGCGC ACATTCATGT GGGCATTTCT TGCGAGCCTC GCAGCCTCCG | 1080 |
| GAAGCTGTCG ACTTCATGAC AAGCATTTTG TGAACTAGGG AAGCTCAGGG GGGTTACTGG | 1140 |
| CTTCTCTTGA GTCACACTGC TAGCAAATGG CAGAACCAAA GCTCAAATAA AAATAAAATA | 1200 |
| ATTTTCATTC ATTCACTC | |
| Seq ID NO: 127 Protein Sequence | |
| Protein Accession #: NP_000068.1 | |
| 1 11 21 31 41 51 | |
| \| \| \| \| \| \| | |
| MEPAAGSSME PSAGWLATAA ARGRVEEVRA LLEAGALPNA PNSYGRRPIQ VNMNGSARVA | 60 |
| ELLLLHGAEP NCAGPATLTR PVHDAAREGF LDTLVVLNRA GARLGVRGAW GRLPVGLAEE | 120 |
| LGNRGVARYL RAAAGGTRGS NNARIDAAEG PSGIPG | |
| Seq ID NO: 128 DNA sequence | |
| Nucleic Acid Accession #: NM_058196.1 | |
| Coding sequence: 104 . . . 421 | |
| 1 11 21 31 41 51 | |
| \| \| \| \| \| \| | |
| TGTGTGGGGG TCTGCTTGGC GGTGAGGGGG CTCTACACAA GCTTCCTTTC CGTCATGCCG | 60 |
| GCCCCCACCC TGGCTCTGAC CATTCTGTTC TCTCTGGCAG GTCATGATGA TGGGCAGGGC | 120 |
| CCGAGTGGCG GAGCTGCTGC TGCTCCACGG CGCGGAGCCC AACTGCGCCG ACCCCGCCAC | 180 |
| TCTCACCCGA CCCGTGCACG ACGCTGCCCG GGAGGGCTTC CTGGACACGC TGGTGGTGCT | 240 |
| GCACCGGGCC GGGGCGCGGC TGGACGTGCG CGATGCCTGG GGCCGTCTGC CCGTGGACCT | 300 |
| GGCTGAGGAG CTGGGCCATC GCGATGTCGC ACGGTACCTG CGCGCGGCTG CGGGGGGCAC | 360 |
| CAGAGGCAGT AACCATGCCC GCATAGATGC CGCGGAAGGT CCCTCAGACA TCCCCGATTG | 420 |
| AAAGAACCAG AGAGGCTCTG AGAAACCTCG GGAAACTTAG ATCATCAGTC ACCGAAGGTC | 480 |
| CTACAGGGCC ACAACTGCCC CCGCCACAAC CCACCCCGCT TTCGTAGTTT TCATTTAGAA | 540 |
| AATAGAGCTT TTAAAAATGT CCTGCCTTTT AACGTAGATA TAAGCCTTCC CCCACTACCG | 600 |
| TAAATGTCCA TTTATATCAT TTTTTATATA TTCTTATAAA AATGTAAAAA AGAAAAACAC | 660 |
| CGCTTCTGCC TTTTCACTGT GTTGGAGTTT TCTGGAGTGA GCACTCACGC CCTAAGCGCA | 720 |
| CATTCATGTG GGCATTTCTT GCGAGCCTCG CAGCCTCCGG AAGCTGTCGA CTTCATGACA | 780 |
| AGCATTTTGT GAACTAGGGA AGCTCAGGGG GGTTACTGGG TTCTCTTGAG TCACACTGCT | 840 |
| AGCAAATGGC AGAACCAAAG CTCAAATAAA AATAAAATAA TTTTCATTCA TTCACTC | |
| Seq ID NO: 129 Protein Sequence | |
| Protein Accession #: NP_478103.1 | |
| 1 11 21 31 41 51 | |
| \| \| \| \| \| \| | |
| MNNGSARVAE LLLLHGAEPN CADPATLTRP VNDAAREGFL GTLVVLNRAG ARLGVRGAWG | 60 |
| RLPVGLAEEL GHRGVARYLR AAAGGTRGSN NARIDAAEGP SGIPG | |
| Seq ID NO: 130 DNA sequence | |
| Nucleic Acid Accession #: NM_058197.1 | |
| Coding sequence: 272 . . . 646 | |
| 1 11 21 31 41 51 | |
| \| \| \| \| \| \| | |
| CCCAACCTGG GGCGACTTCA GGTGTGCCAC ATTCGCTAAG TGCTCGGAGT TAATAGCACC | 60 |
| TCCTCCGAGC ACTCGCTCAC GGCGTCCCCT TGCCTGGAAA GATACCGCGG TCCCTCCAGA | 120 |
| GGATTTGAGG GACAGGGTCG GAGGGGGCTC TTCCGCCAGC ACCGGAGGAA GAAAGAGGAG | 180 |
| GGGCTGGCTG GTCACCAGAG GGTGGGGCGG ACCGCGTGCG CTCGGCGGCT GCGGAGAGGG | 240 |
| GGAGAGCAGG CAGCGGGCGG CGGGGAGCAG CATGGAGCCG GCGGCGGGGA GCAGCATGGA | 300 |
| GCCGGCGGCG GGGACCACCA TGGAGCCTTC GGCTGACTGG CTGGCCACGG CCGCGGCCCG | 360 |
| GGGTCGGGTA GAGGAGGTGC GGGCGCTGCT GGAGGCGGGG GCGCTGCCCA ACGCACCGAA | 420 |
| TAGTTACGGT CGGAGGCCGA TCCAGGTGGG TAGAAGGTCT GCAGCGGGAG CAGGGGATGG | 480 |
| CGGGCGACTC TGGAGGAGGA AGTTTGCAGG GGAATTGGAA TCAGGTAGCG CTTCGATTCT | 540 |
| CCGGAAAAAG GGGAGGCTTC CTGGGGAGTT TTCAGAAGGG GTTTGTAATC ACAGACCTCC | 600 |
| TCCTGGCGAC GCCCTGGGGG CTTGGGAAAC CAAGGAAGAG GAATGAGGAG CCACGCGCGT | 660 |
| ACAGATCTCT CGAATGCTGA GAAGATCTGA AGGGGGGAAC ATATTTGTAT TAGATGGAAG | 720 |
| TCATGATGAT GGGCAGCGCC CGAGTGGCGG AGCTGCTGCT GCTCCACGGC GCGGAGCCCA | 780 |
| ACTGCGCCGA CCCCGCCACT CTCACCCGAC CCGTGCACGA CGCTGCCCGG GAGGGCTTCC | 840 |
| TGGACACGCT GGTGGTGCTG CACCGGGCCG GGGCGCGGCT GGACGTGCGC GATGCCTGGG | 900 |
| GCCGTCTGCC CGTGGACCTG GCTGAGGAGC TGGGCCATCG CGATGTCGCA CGGTACCTGC | 960 |
| GCGCGGCTGC GGGGGGCACC AGAGGCAGTA ACCATGCCCG CATAGATGCC GCGGAAGGTC | 1020 |
| CCTCAGACAT CCCCGATTGA AAGAACCAGA GAGGCTCTGA GAAACCTCGG GAACTTAGAT | 1080 |
| CATCAGTCAC CGAAGGTCCT ACAGGGCCAC AACTGCCCCC GCCACAACCC ACCCCGCTTT | 1140 |
| CGTAGTTTTC ATTTAGAAAA TAGAGCTTTT AAAAATGTCC TGCCTTTTAA CGTAGATATA | 1200 |
| TGCCTTCCCC CACTACCGTA AATGTCCATT TATATCATTT TTTATATATT CTTATAAAAA | 1260 |
| TGTAAAAAAG AAAAACACCG CTTCTGCCTT TTCACTGTGT TGGAGTTTTC TGGAGTGAGC | 1320 |
| ACTCACGCCC TAAGCGCACA TTCATGTGGG CATTTCTTGC GAGCCTCGCA GCCTCCGGAA | 1380 |
| GCTGTCGACT TCATGACAAG CATTTTGTGA ACTAGGGAAG CTCAGGGGGG TTACTGGCTT | 1440 |
| CTCTTGAGTC ACACTGCTAG CAAATGGCAG AACCAAAGCT CAAATAAAAA TAAAATAATT | 1500 |
| TTCATTCATT CACTC | |
| Seq ID NO: 131 Protein Sequence | |
| Protein Accession #: NP_478104.1 | |
| 1 11 21 31 41 51 | |
| \| \| \| \| \| \| | |
| MEPAAGSSME PAAGSSMEPS AGWLATAAAR GRVEEVRALL EAGALPNAPN SYGRRPIQVG | 60 |
| RRSAAGAGGG GRLWRTKFAG ELESGSASIL REKGELPGEF SEGVCNHRPP PGGALGAWET | 120 |
| KEEE | |
| Seq ID NO: 132 DNA sequence | |
| Nucleic Acid Accession #: NM_058195.1 | |
| Coding sequence: 163 . . . 684 | |
| 1 11 21 31 41 51 | |
| \| \| \| \| \| \| | |
| CCTCCCTACG GGCGCCTCCG GCAGCCCTTC CCGCGTGCCC ACCGCTCAGA GCCGTTCCGA | 60 |
| GATCTTCGAC GTCCGGGTGG GAGTGGGCGT GGCGTGCGGG TGGGGGTCAA GCTGCGGGGC | 120 |
| GGGCGCGCTG AGGGAAGGCG CGTGCGCGCC TGCGGGGCGG AGATGCGCAG GGGGCGGTGC | 180 |
| GTGGGTCCCA GTCTGCAGTT AAGGGGGCAG CAGTCGCGCT GCTCACCTCT GGTGCCAAAG | 240 |
| GGCGGCGCAG CGGCTGCCGA GCTCGGCCCT GGAGGCGGCG AGAACATGGT GCGCAGGTTC | 300 |
| TTGGTGACCC TCCGGATTCG GCGCGCGTGC GGCCCGCCGC GAGTGAGGGT TTTCGTGGTT | 360 |
| CACATCCCGC GGCTCACGGG GGAGTGGGCA GCGCCAGGGS CGCCCGCCGC TGTGGCCCTC | 420 |
| GTGCTGATGC TACTGAGGAG CCAGCGTCTA GGGCAGCAGC CGCTTCCTAG AAGACCAGGT | 480 |
| CATGATGATG GGCAGCGCCC GAGTGGCGGA GCTGCTGCTG CTCCACGGCG CGGAGCCCAA | 540 |
| CTGCGCCGAC CCCGCCACTC TCACCCGACC CGTGCACGAC GCTGCCCGGG AGGGCTTCCT | 600 |
| GGACACGCTG GTGGTGCTGC ACCGGGCCGG GGCGCGGCTG GACGTGCGCG ATGCCTGGGG | 660 |
| CCGTCTGCCC GTGGACCTGG CTGAGGAGCT GGGCCATCGC GATGTCGCAC GGTACCTGCG | 720 |
| CGCGGCTGCG GGGGGCACCA GAGGCAGTAA CCATGCCCGC ATAGATGCCG CGGAAGGTCC | 780 |
| CTCAGACATC CCCGATTGAA AGAACCAGAG AGGCTCTGAG AAACCTCGGG AAACTTAGAT | 840 |
| CATCAGTCAC CGAAGGTCCT ACAGGGCCAC AACTGCCCCC GCCACAACCC ACCCCGCTTT | 900 |
| CGTAGTTTTC ATTTAGAAAA TAGAGCTTTT AAAAATGTCC TGCCTTTTAA CGTAGATATA | 960 |
| TGCCTTCCCC CACTACCGTA AATGTCCATT TATATCATTT TTTATATATT CTTATAAAAA | 1020 |
| TGTAAAAAAG AAAAACACCG CTTCTGCCTT TTCACTGTGT TGGAGTTTTC TGGAGTGAGC | 1060 |
| ACTCACGCCC TAAGCGCACA TTCATGTGGG CATTTCTTGC GAGCCTCGCA GCCTCCGGAA | 1140 |
| GCTGTCGACT TCATGACAAG CATTTTGTGA ACTAGGGAAG CTCAGGGGGG TTACTGGCTT | 1200 |
| CTCTTGAGTC ACACTGCTAG CAAATGGCAG AACCAAAGCT CAAATAAAAA TAAAATAATT | 1260 |
| TTCATTCATT CACTC | |
| Seq ID NO: 133 Protein Sequence | |
| Protein Accession #: NP_478102.1 | |
| 1 11 21 31 41 51 | |
| \| \| \| \| \| \| | |
| MGRGRCVGPS LQLRGQEWRC SPLVPKGGAA AAELGPGGGE NMVRRFLVTL RIRRACGPPR | 60 |
| VRVPVVHIPR LTGEWAAPGA PAAVALVLML LRSQRLGQQP LPRRPGNDDG QRPSGGAAAA | 120 |
| PRRGAQLRRP RNSNPTRARR CPGGLPDNAG GAAPGRGAAG RANCLGPSAP GPG | |
| Seq ID NO: 134 DNA sequence | |
| Nucleic Acid Accession #: NM_023915 | |
| Coding sequence: 1 . . . 1077 | |
| 1 11 21 31 41 51 | |
| \| \| \| \| \| \| | |
| ATGGGGTTCA ACTTGACGCT TGCAAAATTA CCAAATAACG AGCTGCACGG CCAAGAGAGT | 60 |
| CACAATTCAG GCAACAGGAG CGACGGGCCA GGAAAGAACA CCACCCTTCA CAATGAATTT | 120 |
| GACACAATTG TCTTGCCGGT GCTTTATCTC ATTATATTTG TGGCAAGCAT CTTGCTGAAT | 180 |
| GGTTTAGCAG TGTGGATCTT CTTCCACATT AGGAATAAAA CCAGCTTCAT ATTCTATCTC | 240 |
| AAAAACATAG TGGTTGCAGA CCTCATAATG ACGCTGACAT TTCCATTTCG AATAGTCCAT | 300 |
| GATGCAGGAT TTGGACCTTG GTACTTCAAG TTTATTCTCT GCAGATACAC TTCAGTTTTG | 360 |
| TTTTATGCAA ACATGTATAC TTCCATCGTG TTCCTTGGGC TGATAAGCAT TGATCGCTAT | 420 |
| CTGAAGGTGG TCAAGCCATT TGGGGACTCT CGGATGTACA GCATAACCTT CACGAAGGTT | 480 |
| TTATCTGTTT GTGTTTGGGT GATCATGGCT GTTTTGTCTT TGCCAAACAT CATCCTAACA | 540 |
| AATGGTCAGC CAACAGAGGA CAATATCCAT GACTGCTCAA AACTTAAAAG TCCTTTGGGG | 600 |
| GTCAAATGGC ATACGGCAGT CACCTATGTG AACAGCTGCT TGTTTGTGGC CGTGCTGGTG | 660 |
| ATTCTGATCG GATGTTACAT AGCCATATCC AGGTACATCC ACAAATCCAG CAGGCAATTC | 720 |
| ATAAGTCAGT CAAGCCGAAA GCGAAAACAT AACCAGAGCA TCAGGGTTGT TGTGGCTGTG | 780 |
| TTTTTTACCT GCTTTCTACC ATATCACTTG TGCAGAATTC CTTTTACTTT TAGTCACTTA | 840 |
| GACAGGCTTT TAGATGAATC TGCACAAAAA ATCCTATATT ACTGCAAAGA AATTACACTT | 900 |
| TTCTTGTCTG CGTGTAATGT TTGCCTGGAT CCAATAATTT ACTTTTTCAT GTGTAGGTCA | 960 |
| TTTTCAAGAA GGCTGTTCAA AAAATCAAAT ATCAGAACCA GGAGTGAAAG CATCAGATCA | 1020 |
| CTGCAAAGTG TGAGAAGATC GGAAGTTCGC ATATATTATG ATTACACTGA TGTGTAA | |
| Seq ID NO: 135 Protein Sequence | |
| Protein Accession #: NP_076404 | |
| 1 11 21 31 41 51 | |
| \| \| \| \| \| \| | |
| MGFNLTLAKL PNNELNGQES HNSGNRSDGP GKNTTLHNEF DTIVLPVLYL IIFVASILLN | 60 |
| GLAVWIFFNI RNKTSFIFYL KNIVVAGLIM TLTFPFRIVN GAGEGPWYFK FILCRYTSVL | 120 |
| FYANMYTSIV PLGLISIDRY LRVVRPFGGS RMYSITFTKV LSVCVWVIMA VLSLPNIILT | 180 |
| NGQPTEGNIH GCSKLKSPLG VKWNTAVTYV NSCLPVAVLV ILIDCYTAIS RYINRSSRGF | 240 |
| ISQSSRKRKN NQSIRVVVAV PPTCPLPYHL CRIPPTFSNL GRLLGESAQK ILYYCKETTL | 300 |
| FLSACNVCLG PIIYFPMCRS FSRRLPKKSN IRTRSESIRS LQSVRRSEVR IYYGYTGV | |
| Seq ID NO: 136 DNA sequence | |
| Nucleic Acid Accession #: NM_005329.1 | |
| Coding sequence: 1 . . . 1662 | |
| 1 11 21 31 41 51 | |
| \| \| \| \| \| \| | |
| ATGCCGGTGC AGCTGACGAC AGCCCTGCGT GTGGTGGGCA CCAGCCTGTT TGCCCTGGCA | 60 |
| GTGCTGGGTG GCATCCTGGC AGCCTATGTG ACGGGCTACC AGTTCATCCA CACGGAAAAG | 120 |
| CACTACCTGT CCTTCGGCCT GTACGGCGCC ATCCTGGGCC TGCACCTGCT CATTCAGAGC | 180 |
| CTTTTTGCCT TCCTGGAGCA GCCGCGCATG CGACGTGCCG GCCAGGCCCT GAAGCTGCCC | 240 |
| TCCCCGCGGC GGGGCTCGGT GGCACTGTGC ATTGCCGCGT ACCAGGAGGA CCCTGACTAC | 300 |
| TTGCGCAAGT GCCTGCGCTC GGCCCAGCGC ATCTCCTTCC CTGACCTCAA GGTGGTCATG | 360 |
| GTGGTGGATG GCAACCGCCA GGAGGACGCC TACATGCTGG ACATCTTCCA CGAGGTGCTG | 420 |
| GGCGGCACCG AGCAGGCCGG CTTCTTTGTG TGGCGCAGCA ACTTCCATGA GGCAGGCGAG | 480 |
| GGTGAGACGG AGGCCAGCCT GCAGGAGGGC ATGGACCGTG TGCCGGATGT GGTGCGGGCC | 540 |
| AGCACCTTCT CGTGCATCAT GCACAAGTGG GGAGGCAAGC GCGAGGTCAT GTACACGGCC | 600 |
| TTCAAGGCCC TCGGCGATTC GGTGGACTAC ATCCAGGTGT GCGACTCTGA CACTGTGCTG | 660 |
| GATCCAGCCT GCACCATCGA GATGCTTCGA GTCCTGGAGG AGGATCCCCA ACTAGGGGGA | 720 |
| GTCGGGGGAG ATGTCCAGAT CCTCAACAAG TACGACTCAT GGATTTCCTT CCTGAGCAGC | 780 |
| GTGCGGTACT GGATGGCCTT CAACGTGGAG CGGGCCTGCC AGTCCTACTT TGGCTGTGTG | 840 |
| CAGTGTATTA GTGGGCCCTT GGGCATGTAC CGCAACAGCC TCCTCCAGCA GTTCCTGGAG | 900 |
| GACTGGTACC ATCAGAAGTT CCTAGGCAGC AAGTGCAGCT TCGGGGATGA CCGGCACCTC | 960 |
| ACCAACCGAG TCCTGAGCCT TGGCTACCGA ACTAAGTATA CCGCGCGCTC CAAGTGCCTC | 1020 |
| ACAGAGACCC CCACTAAGTA CCTCCGGTGG CTCAACCAGC AAACCCGCTG GAGCAAGTCT | 1080 |
| TACTTCCGGG AGTGGCTCTA CAACTCTCTG TGGTTCCATA AGGACCACGT CTGGATGACC | 1140 |
| TACGAGTCAG TGGTCACGGG TTTCTTCCCC TTCTTCCTCA TTGCCACGGT TATACAGCTT | 1200 |
| TTCTACCGGG GCCGCATCTG GAACATTCTC CTCTTCCTGC TGACGGTGCA GCTGGTGGGC | 1260 |
| ATTATCAAGG CCACCTACGC CTGCTTCCTT CGGGGCAATG CAGAGATGAT CTTCATGTCC | 1320 |
| CTCTACTCCC TCCTCTATAT GTCCAGCCTT CTGCCGGCCA AGATCTTTGC CATTGCTACC | 1380 |
| ATCAACAAAT CTGGCTGGGG CACCTCTGGC CGAAAAACCA TTGTGGTGAA CTTCATTGGC | 1440 |
| CTCATTCCTG TGTCCATCTG GGTGGCAGTT CTCCTGGGAG GGCTGGCCTA CACAGCTTAT | 1500 |
| TGCCAGGACC TGTTCAGTGA GACAGAGCTA GCCTTCCTTG TCTCTGGGGC TATACTGTAT | 1560 |
| GGCTGCTACT GGGTGGCCCT CCTCATGCTA TATCTGGCCA TCATCGCCCG GCGATGTGGG | 1620 |
| AAGAAGCCGG AGCAGTACAG CTTGGCTTTT GCTGAGGTGT GA | |
| Seq ID NO: 137 Protein Sequence | |
| Protein Accession #: NP_005320.1 | |
| 1 11 21 31 41 51 | |
| \| \| \| \| \| \| | |
| MPVQLTTALR VVGTSLFALA VLGGILAAYV TGYQFIHTEK HYLSPGLYGA ILGLHLLIQS | 60 |
| LFAPLENRRM RRAGQALKLP SPRRGSVALC IAAYQEGPGY LRKCLRSAQR ISFPGLKVVM | 120 |
| VVGGNRQEGA YMLGIFHEVL GGTEQAGFFV WRSNFHEAGE GETEASGQEG MGRVRGVVRA | 180 |
| STPSCIMQKW GGKREVNYTA FKALGGSVGY IQVCGSGTVL GPACTIEMLR VLEEGPQVGG | 240 |
| VGGGVQILNK YGSWISFLSS VRYWNAFNVE RACGSYFGCV QCISGPLGNY RNSLLQQFLE | 300 |
| GWYNQKFLGS KCSPGGGRHL TNRVLSLGYR TKYTARSKCL TETPTKYLRW LNQQTRWSKS | 360 |
| YFREWLYNSL WFHKHNLWMT YESVVTGFFP FFLIATVIQL FYRGRINNIL LFLLTVQLVG | 420 |
| IIRATYACFL RDNAEMIFMS LYSLLYMSSL LPARIFAIAT INKSGWGTSG RKTIVVNFID | 480 |
| LIPVSINVAV LGGGLAYTAY CGGLESETEL AFLVSGAILY GCYWVALLML YLAIIARRCG | 540 |
| KKPEGYSLAF AEV | |
| Seq ID NO: 138 DNA Sequence | |
| Nucleic Acid Accession #: NM_001327.1 | |
| Coding sequence: 89 . . . 631 | |
| 1 11 21 31 41 51 | |
| \| \| \| \| \| \| | |
| AGCAGGGGGC GCTGTGTGTA CCGAGAATAC GAGAATACCT CGTGGGCCCT GACCTTCTCT | 60 |
| CTGAGAGCCG GGCAGAGGCT CCGGAGCCAT GCAGGCCGAA GGCCGGGGCA CAGGGGGTTC | 120 |
| GACGGGCGAT GCTGATGGCC CAGGAGGCCC TGGCATTCCT GATGGCCCAG GGGGCAATGC | 180 |
| TGGCGGCCCA GGAGAGGCGG GTGCCACGGG CGGCAGAGGT CCCCGGGGCG CAGGGGCAGC | 240 |
| AAGGGCCTCG GGGCCGGGAG GAGGCGCCCC GCGGGGTCCG CATGGCGGCG CGGCTTCAGG | 300 |
| GCTGAATGGA TGCTGCAGAT GCGGGGCCAG GGGGCCGGAG AGCCGCCTGC TTGAGTTCTA | 360 |
| CCTCGCCATG CCTTTCGCGA CACCCATGGA AGCAGAGCTG GCCCGCAGGA GCCTGGCCCA | 420 |
| GGATGCCCCA CCGCTTCCCG TGCCAGGGGT GCTTCTGAAG GAGTTCACTG TGTCCGGCAA | 480 |
| CATACTGACT ATCCGACTGA CTGCTGCAGA CCACCGCCAA CTGCAGCTCT CCATCAGCTC | 540 |
| CTGTCTCCAG CAGCTTTCCC TGTTGATGTG GATCACGCAG TGCTTTCTGC CCGTGTTTTT | 600 |
| GGCTCAGCCT CCCTCAGGGC AGAGGCGCTA AGCCCAGCCT GGCGCCCCTT CCTAGGTCAT | 660 |
| GCCTCCTCCC CTAGGGAATG GTCCCAGCAC GAGTGGCCAG TTCATTGTGG GGGCCTGATT | 720 |
| GTTTGTCGCT GGAGGAGGAC GGCTTACATG TTTGTTTCTG TAGAAAATAA AACTGAGCTA | 780 |
| Seq ID NO: 139 Protein Sequence | |
| Protein Accession #: NP_001318.1 | |
| 1 11 21 31 41 51 | |
| \| \| \| \| \| \| | |
| MQAEGRGTGG STGGAGGPGG PGIPGGPGGN AGGGGEAGAT GGRGPRGAGA ARASGGGGGA | 60 |
| PRGPHGGAAS GLNGCCRCGA RGPESELLEF YLANPFATPM EARLARESLA QGAPPLPVPG | 120 |
| VLLREFTVSG NILTIRLTAA GHRQLQLSIS SCLQQLSLLM WITQCFLPVF LAQPPSGQRR | 180 |
| Seq ID NO: 140 DNA Sequence | |
| Nucleic Acid Accession #: Eos sequence | |
| Coding sequence: 53 . . . 459 | |
| 1 11 21 31 41 51 | |
| \| \| \| \| \| \| | |
| CCTCGTGGGC CCTGACCTTC TCTCTGAGAG GCGGCCACAG GCTCCGGAGC CATGCAGGCC | 60 |
| GAAGGCCAGG GCACAGGGGG TTCGACGGGC GATGCTGATG GGCCAGGAGG CCCTGGCATT | 120 |
| CCTGATGGCC CAGGGGGCAA TGCTGGCGGC CCAGGAGAGG CGGGTGCCAC GGGCGGCAGA | 180 |
| GGTCCCCGGG GCGCAGGGGC AGCAAGGGCC TCGGGGCCGA GAGGAGGCCC CCCGCGGGGT | 240 |
| CCGCATGGCG GTGCCGCTTC TGCGCAGGAT GGAAGGTGCC CCTGCGGGGC CAGGAGGCCG | 300 |
| GACAGCCGCC TGCTTCAGTT CCGACTGACT GCTGCAGACC ACCGCCAACT GCAGCTCTCC | 360 |
| ATCAGCTCCT GTCTCCAGCA GCTTTCCCTG TTGATGTGGA TCACGCAGTG CTTTCTGCCC | 420 |
| GTGTTTTTGG CTCAGGCTCC CTCAGGGCAG AGGCGCTAAG CCCAGCCTGG CGCCCCTTCC | 480 |
| TAGGTCATGC CTCCTCCCCT AGGGAATGGT CCCAGCACGA GTGGCCAGTT CATTGTGGGG | 540 |
| GCCTGATTGT TTGTCGCTGG AGGAGGACGG CTTACATGTT TGTTTCTGTA GAAAATAAAG | 600 |
| CTGAGCTA | |
| Seq ID NO: 141 Protein Sequence | |
| Protein Accession #: Eos sequence | |
| 1 11 21 31 41 51 | |
| \| \| \| \| \| \| | |
| MQAEGQGTGG STGGAGGPGG PGIPGGPGGN AGGPDNAGAT GGRGPRGAGA ANASGPRGGA | 60 |
| PRGPHDGAAS AQGGRCPCGA RRPGSRLLQP RLTAAGNRQL QLSISSCLQQ LSLLMWITQC | 120 |
| FLPVPLAQAP SGQRR | |
| Seq ID NO: 142 DNA Sequence | |
| Nucleic Acid Accession #: NM_130467.2 | |
| Codinq sequence: 246 . . . 638 | |
| 1 11 21 31 41 51 | |
| \| \| \| \| \| \| | |
| AGGCAGAGCT CTGCAAGGAG AGGTTGTGTC TTCGTTCTTT CCGCCATCTT CGTTCTTTCC | 60 |
| AACATCTTCG TTCTTTCTCA CTGACCGAGA CTCAGCCGGT AGGTCTGCAG AGTGGTCTTC | 120 |
| CTGGTAATTT AGTTGTGAGT GAATGTGTGG AGGAGCCAGC GGGCTTAGGA CAGGTCCTGT | 180 |
| GGCACAGTCC GTGGCTTTGA GGGAAAAGGG CCTCGCGGTG GTCCTCCGCC TTCCCCCAGG | 240 |
| TCGTGATGCA GGCGCCATGG GCCGGTAATC GTGGCTGGGC TGGAACGAGG GAGGAAGTGA | 300 |
| GAGATATGAG TGAGCATGTA ACAAGATCCC AATCCTCAGA AAGAGGAAAT GACCAAGAGT | 360 |
| CTTCCCAGCC AGTTGGACCT GTGATTGTCC AGCAGCCCAC TGAGGAAAAA CGTCAAGAAG | 420 |
| AGGAACCACC AACTGATAAT CAGGGTATTG CACCTAGTGG GGAGATCAAA AATGAAGGAG | 480 |
| CACCTGCTGT TCAAGGGACT GATGTGGAAG CTTTTCAACA GGAACTGGCT CTGCTTAAGA | 540 |
| TAGAGGATGC ACCTGGAGAT GGTCCTGATG TCAGGGAGGG GACTCTGCCC ACTTTTGATC | 600 |
| CCACTAAAGT GCTGGAAGCA GGTGAAGGGC AACTATAGGT TTAAACCAAG ACAAATGAAG | 660 |
| ACTGAAACCA AGAATATTGT TCTTATGCTG GAAATTTGAC TCCTAACATT CTCTTAATAA | 720 |
| AGTTTTACAG TTTTC | |
| Seq ID NO: 143 Protein Sequence | |
| Protein Accession #: NP_569734 | |
| 1 11 21 31 41 51 | |
| \| \| \| \| \| \| | |
| MSEHVTRSQS SERGNGQESS QPVGPVIVQQ PTEEKRQEEE PPTGNQGIAP SGEIKNEGAP | 60 |
| AVGGTGVEAF QGELALLRIE GAPGGGPGVR EGTLPTFGPT KVLEAGEGQL | |
| Seq ID NO: 144 DNA Sequence | |
| Nucleic Acid Accession #: NM 001476.1 | |
| Coding sequence: 82 . . . 435 | |
| 1 11 21 31 41 51 | |
| \| \| \| \| \| \| | |
| GCCAGGGAGC TGTGAGGCAG TGCTGTGTGG TTCCTGCCGT CCGGACTCTT TTTCCTCTAC | 60 |
| TGAGATTCAT CTGTGTGAAA TATGAGTTGG CGAGGAAGAT CGACCTATTA TTGGCCTAGA | 120 |
| CCAAGGCGCT ATGTACAGCC TCCTGAAGTG ATTGGGCCTA TGCGGCCCGA GCAGTTCAGT | 180 |
| GATGAAGTGG AACCAGCAAC ACCTGAAGAA GGGGAACCAG CAACTCAACG TCAGGATCCT | 240 |
| GCAGCTGCTC AGGAGGGAGA GGATGAGGGA GCATCTGCAG GTCAAGGGCC GAAGCCTGAA | 300 |
| GCTGATAGCC AGGAACAGGG TCACCCACAG ACTGGGTGTG AGTGTGAAGA TGGTCCTGAT | 360 |
| GGGCAGGAGG TGGACCCGCC AAATCCAGAG GAGGTGAAAA CGCCTGAAGA AGGTGAAAAG | 420 |
| CAATCACAGT GTTAAAAGAA GACACGTTGA AATGATGCAG GCTGCTCCTA TGTTGGAAAT | 480 |
| TTGTTCATTA AAATTCTCCC AATAAAGCTT TACAGCCTTC TGCAAAA | |
| Seq ID NO: 145 Protein Sequence | |
| Protein Accession #: NP_001467.1 | |
| 1 11 21 31 41 51 | |
| \| \| \| \| \| \| | |
| MSWRGRSTYY WPRPRRYVQP PEVIDPMRPE QFSGEVEPAT PEEGEPATQR QGPAAAQEGE | 60 |
| GEGASAGQGP KPEAGSQBQG NPQTGCECEG GPGGQEVGPP NPEEVKTPEE GEKQSQC | |
| Seq ID NO: 146 DNA Sequence | |
| Nucleic Acid Accession #: NM_005562 | |
| Coding sequence: 90 . . . 3671 | |
| 1 11 21 31 41 51 | |
| \| \| \| \| \| \| | |
| ACAGCGGAGC GCAGAGTGAG AACCACCAAC CGAGGCGCCG CCCAGCGACC CCTGCAGCGG | 60 |
| AGACAGAGAC TGAGCGGCCC GGCACCGCCA TGCCTCCCCT CTGGCTGGGC TGCTGCCTCT | 120 |
| GCTTCTCGCT CCTCCTGCCC GCAGCCCGGG CCACCTCCAG CAGCGAAGTC TGTCATTGCA | 180 |
| ATGGGAAGTC CAGGCAGTGT ATCTTTGATC GGGAACTTCA CAGACAAACT GGAAATGGAT | 240 |
| TCCGCTGCCT CAACTGCAAT GACAACACTG ATGGCATTCA CTGCGAGAAG TGCAAGAATG | 300 |
| GCTTTTACCC GCACAGAGAA AGGGACCGCT GTTTGCCCTG CAATTGTAAC TCCAAAGGTT | 360 |
| CTCTTAGTGC TCGATGTGAC AACTCTGGAC GGTCCAGCTG TAAACCAGGT GTGACAGGAG | 420 |
| CCAGATGCGA CCGATGTCTG CCAGGCTTCC ACATGCTCAC GGATGCGCGC TGCACCCAAG | 480 |
| ACCAGAGACT GCTAGACTCC AAGTGTGACT GTGACCCAGC TGGCATCGCA GGGCCCTGTG | 540 |
| ACGCGGGCCG CTGTGTCTGC AAGCCAGCTG TTACTGGAGA ACGCTGTGAT AGGTGTCGAT | 600 |
| CAGGTTACTA TAATCTGGAT GGGGGGAACC CTGAGGGCTG TACCCAGTGT TTCTGCTATG | 660 |
| GGCATTCAGC CAGCTGCCGC AGCTCTGCAG AATACAGTGT CCATAAGATC ACCTCTACCT | 720 |
| TTCATCAAGA TGTTGATGGC TGGAAGGCTG TCCAACGAAA TGGGTCTCCT GCAAAGCTCC | 780 |
| AATGGTCACA GCGCCATCAA GATGTGTTTA GCTCAGCCCA ACGACTAGAC CCTGTCTATT | 840 |
| TTGTGGCTCC TGCCAAATTT CTTGGGAATC AACAGGTGAG CTATGGGCAA AGCCTGTCCT | 900 |
| TTGACTACCG TGTGGACAGA GGAGGCAGAC ACCCATCTGC CCATGATGTG ATTCTGGAAG | 960 |
| GTGCTGGTCT ACGCATCACA GCTCCCTTGA TGCCACTTGG CAAGACACTG CCTTGTGGGC | 1020 |
| TCACCAAGAC TTACACATTC AGGTTAAATG AGCATCCAAG CAATAATTGG AGCCCCCAGC | 1080 |
| TGAGTTACTT TGAGTATCGA AGGTTACTGC GGAATCTCAC AGCCCTCCGC ATCCGAGCTA | 1140 |
| CATATGGAGA ATACACTACT GGGTACATTG ACAATGTGAC CCTGATTTCA GCCCGCCCTG | 1200 |
| TCTCTGGAGC CCCAGCACCC TGGGTTGAAC AGTGTATATG TCCTGTTGGG TACAAGGGGC | 1260 |
| AATTCTGCCA GGATTGTGCT TCTGGCTACA ACAGAGATTC ACCGAGACTG GGGCCTTTTG | 1320 |
| GCACCTGTAT TCCTTGTAAC TGTCAAGGGG GAGGGGCCTG IDATCCAGAC ACAGGAGATT | 1380 |
| GTTATTCAGG GGATGAGAAT CCTGACATTG AGTGTGCTGA CTGCCCAATT GGTTTCTACA | 1440 |
| ACGATCCGCA CGACCCCCGC AGCTGCAAGC CATGTCCCTG TCATAACGGG TTCAGCTGCT | 1500 |
| CAGTGATGCC GGAGACGGAG GAGGTGGTGT GCAATAACTG CCCTCCCGGG GTCACCGGTG | 1560 |
| CCCGCTGTGA CCTCTGTGCT GAIDGCTACT TTGGGGACCC CTTTGGTGAA CATGGCCCAG | 1620 |
| TGAGGCCTTG TCACCCCTGT CAATGCAACA ACAATGTGGA CCCCAGTGCC TCTGGGAATT | 1680 |
| GTGACCGGCT GACAGGCACG TGTTTGAAGT GTATCCACAA CACAGCCGGC ATCTACTGCG | 1740 |
| ACCAGTGCAA AGCAGGCTAC TTCCGGCACC CATTGGCTCC CAACCCAGCA GACAAGTGTC | 1800 |
| GAGCTTGCAA CTGTAACCCC ATGGGCTCAG AGCCTGTAGC ATGTCGAAGT GATGCCACCT | 1860 |
| GTGTTTGCAA GCCAGGATTT GGTGGCCCCA ACTCTGAGCA TGCAGCATTC AGCTGTCCAG | 1920 |
| CTTGCTATAA TCAAGTGAAG ATTCAGATGG ATCAGTTTAT GCAGCAGCTT CAGAGAATGG | 1980 |
| AGGCCCTGAT TTCAAAGGCT CAGGGTGGTG ATGGAGTACT ACCTCATACA GAGCTGGAAG | 2040 |
| GCAGGATGCA GCAGGCTGAG CAGGCCCTTC ACGACATTCT GAGAGATGCC CAGATTTCAG | 2100 |
| AAGGTGCTAG CAGATCCCTT GGTCTCCAGT TGGCCAAGGT GACGAGCCAA GAGAACAGCT | 2160 |
| ACCAGAGCCG CCTGGATGAC CTCAAGATGA CTGTGGAAAG AGTTCGGGCT CTGGGAAGTC | 2220 |
| AGTACCAGAA CCGAGTTCGG GATACTCACA GGCTCATCAC TCAGATGCAG CTGAGCCTGG | 2280 |
| CAGAAAGTGA AGCTTCCTTG GGAAACACTA ACATTCCTGC CTCAGACCAC TACGTGCGGC | 2340 |
| CAAATGGCTT TAAAAGTCTG GCTCAGGAGG CCACAAGATT AGCAGAAAGC CACGTTGAGT | 2400 |
| CAGCCAGTAA CATGGAGCAA CTGACAAGGG AAACTGAGGA CTATTCCAAA CAAGCCCTCT | 2460 |
| CACTGGTCCG CAACGCCCTG CATGAAGGAG TCGGAAGCGG AAGCGGTAGC CCGGACGGTG | 2520 |
| CTGTGGTGCA AGGGCTTGTG GAAAAATTGG AGAAAACCAA GTCCCTGGCC CAGCAGTTGA | 2500 |
| CAAGGGAGGC CACTCAAGCG GAAATTGAAG CAGATAGGTC TTATCAGCAC AGTCTCCGCC | 2640 |
| TCCTGGATTC AGTGTCTCGG CTTCAGGGAG TCAGTGATCA GTCCTTTCAG GTGGAAGAAG | 2700 |
| CAAAGAGGAT CAAACAAAAA GCGGATTCAC TCTCAACGCT GGTAACCACG CATATGGATG | 2760 |
| AGTTCAAGCG TACACAAAAG AATCTGGGAA ACTGGAAAGA AGAAGCACAG CAGCTCTTAC | 2820 |
| AGAATGGAAA AAGTGGGAGA GAGAAATCAG ATCAGCTGCT TTCCCGTGCC AATCTTGCTA | 2880 |
| AAAGCAGAGC ACAAGAAGCA CTGAGTATGG GCAATGCCAC TTTTTATGAA GTTCACACCA | 2940 |
| TCCTTAAAAA CCTCAGAGAG TTTGACCTGC AGGTGGACAA CAGAAAAGCA CAACCTGAAG | 3000 |
| AAGCCATGAA GAGACTCTCC TACATCAGCC AGAAGGTTTC AGATGCCAGT GACAAGACCC | 3060 |
| AGCAAGCAGA AAGAGCCCTG GGGAGCGCTG CTGCTGATGC ACACAGGGCA AAGAATGGGG | 3120 |
| CCGGGGAGGC CCTGGAAATC TCCAGTGAGA TTGAACAGGA GATTGGGAGT CTGAACTTGG | 3180 |
| AAGCCAATGT GACAGCAGAT GGAGCCTTGG CCATGGAAAA GGGACTGGCC TCTCTGAAGA | 3240 |
| GTGAGATGAG GGAAGTGGAA GGAGAGCTGG AAAGGAAGGA GCTGGAGTTT GACACGAATA | 3300 |
| TGGATGCAGT ACAGATGGTG ATTACAGAAG CCCAGAAGGT TGATACCAGA GCCAAGAACG | 3360 |
| CTGGGGTTAC AATCCAAGAC ACACTCAACA CATTAGACGG CCTCCTGCAT CTGATGGACC | 3420 |
| AGCCTCTCAG TGTAGATGAA GAGGGGCTGG TCTTACTGGA GCAGAAGCTT TCCCGAGCCA | 3480 |
| AGACCCAGAT CAACAGCCAA CTGCGGCCCA TGATGTCAGA GCTGGAAGAG AGGGCACGTC | 3540 |
| AGCAGAGGGG CCACCTCCAT TTGCTGGAGA CAAGCATAGA TGGGATTCTG GCTGATGTGA | 3600 |
| AGAACTTGGA GAACATTAGG GACAACCTGC CCCCAGGCTG CTACAATACC CAGGCTCTTG | 3660 |
| AGCAACAGTG AAGCTGCCAT AAATATTTCT CAACTGAGGT TCTTGGGATA CAGATCTCAG | 3720 |
| GGCTCGGGAG CCATGTCATG TGAGTGGGTG GGATGGGGAC ATTTGAACAT GTTTAATGGG | 3780 |
| TATGCTCAGG TCAACTGACC TGACCCCATT CCTGATCCCA TGGCCAGGTG GTTGTCTTAT | 3840 |
| TGCACCATAC TCCTTGCTTC CTGATGCTGG GCAATGAGGC AGATACCACT GGGTGTGAGA | 3900 |
| ATGATCAAGG ATCTGGACCC CAAAGAATAG ACTGGATGGA AAGACAAACT GCACAGGCAG | 3960 |
| ATGTTTGCCT CATAATAGTC GTAAGTGGAG TCCTGGAATT TGGACAAGTG CTGTTGGCAT | 4020 |
| ATAGTCAACT TATTCTTTGA GTAATGTGAC TAAAGGAAAA AACTTTGACT TTGCCCAGGC | 4080 |
| ATGAAATTCT TCCTAATGTC AGAACAGAGT GCAACCCAGT CACACTGTGG CCAGTAAAAT | 4140 |
| ACTATTGCCT CATATTGTCC TCTGCAAGCT TCTTGCTGAT CAGAGTTCCT CCTACTTACA | 4200 |
| ACCCAGGGTG TGAACATGTT CTCCATTTTC AAGCTGGAAG AAGTGAGCAG TGTTGCAGTG | 4260 |
| AGGACCTGTA AGGCAGGCCC ATTCAGAGCT ATGGTGCTTG CTGGTGCCTG CCACCTTCAA | 4320 |
| GTTCTGGACC TGGGCATGAC ATCCTTTCTT TTAATGATGC CATGGCAACT TAGAGATTGC | 4380 |
| ATTTTTATTA AAGCATTTCC TACCAGCAAA GCAAATGTTG GGAAAGTATT TACTTTTTCG | 4440 |
| GTTTCAAAGT GATAGAAAAG TCTCGCTTGG GCATTCAAAG AGGTAAAATT CTCTAGATTT | 4500 |
| ATTACTGCTA ATTCAATCCT ACTTTTCGAA CACCAAAAAT GATCCGCATC AATGTATTTT | 4560 |
| ATCTTATTTT CTCAATCTCC TCTCTCTTTC CTCCACCCAT AATAAGAGAA TGTTCCTACT | 4620 |
| CACACTTCAG CTGGGTCACA TCCATCCCTC CATTCATCCT TCCATCCATC TTTCCATCCA | 4680 |
| TTACCTCCAT CCATCCTTCC AACATATATT TATTGAGTAC CTACTGTGTG CCAGGGGCTG | 4740 |
| GTGGGACACT GGTGACATAG TCTCTGCCCT CATAGAGTTG ATTGTCTAGT GAGGAAGACA | 4800 |
| AGCATTTTTA AAAAATAAAT TTAAACTTAC AAACTTTGTT TGTCACAAGT GGTGTTTATT | 4860 |
| GCAATAACCG CTTCGTTTGC AACCTCTTTG CTCAACAGAA CATATGTTGC AAGACCCTCC | 4920 |
| CATGGGGCCA CTTCAGTTTT GGCAAGGCTG ACAGAGCTCT GGGTTGTGCA CATTTCTTTG | 4980 |
| CATTCCAGCT GTCACTCTGT GCCTTTCTAC AACTGATTGC AACAGACTGT TGAGTTATGA | 5040 |
| TAACACCAGT GGGAATTGCT GGAGGAACCA GAGCCACTTC CACGTTGGCT GGGAAGACTA | 5100 |
| TGGTGCTGCC TTGCTTCTGT ATTTCCTTGG ATTTTCCTGA AAGTGTTTTT AAATAAAGAA | 5160 |
| CAATTGTTAG ATGCC | |
| Seq ID NO: 147 Protein Sequence | |
| Protein Accession #: NP_005553 | |
| 1 11 21 31 41 51 | |
| \| \| \| \| \| \| | |
| MPALWLGCCL CFSLLLPAAR ATSRREVCDC NGKSRQCIFG RELNRQTGNG FRCLNCNGNT | 60 |
| GGINCEKCKN GFYRNRERGR CLPCNCNSKG SLSARCGNSG RCSCKPGVTG ARCGRCLPGF | 120 |
| NMLTGAGCTQ GQRLLGSKCG CGPAGIAGPC GAGRCVCKPA VTGERCGRCR SGYYNLGGGN | 180 |
| PEGCTQCFCY GNSASCRSSA EYSVNKITST FNQGVGGNKA VQRNGSPAKL QWSQRNQGVF | 240 |
| SSAQRLGPVY FVAPAKFLGN QQVSYGQSLS PGYRVGRGGN NPSANGVILN GAGLRITAPL | 300 |
| MPLGKTLPCG LTKTYTPRLN ENPSNNWSPQ LSYFEYRRLL RNLTALRIRA TYGEYSTGYT | 360 |
| GNVTLISARP VSGAPAPWVE QCICPVGYKG QFCQGCASGY KRGSARLGPF GTCIPCNCQG | 420 |
| GGACGPGTGG CYSGGENPGI ECAGCPIDPY NDPNGPRSCK PCPCNNGFSC SVMPNTEEVV | 480 |
| CNNCPPGVTG ARCELCAGGY EGGPEGENGP VRPCQPCQCN NNVGPSASGN CGRLTGRCLK | 540 |
| CTNNTAGIYC GQCKAGYFGG PLAPNPAGKC RACNCNPMGS EPVGCRSGGT CVCKPGFGGP | 600 |
| NCEHGAFSCP ACYNQVEIQE GQPMQQLQRM EALISKAQGG GGVVPGTELE GRMQQAEQAL | 660 |
| QGILEGAQIS EGASRSLGLQ LAKVRSQENS YQSRLGGLKN TVERVRALGS QYQNRVRGTN | 720 |
| RLITQMQLSL AESEASLGNT NIPASGHYVG PNGPKSLAQE ATRLAESNVE SASNNEQLTR | 780 |
| ETEGYSEQAL SLVRKALNEG VGSGSGSPGG AVVQGLVEKL SKTKSLAQQL TREATQAEIE | 840 |
| AGRSYQNSLR LLGSVSRLQG VSGQSFQVEE AERIKGKAGS LSTLVTRHMD EFKRTQKNLG | 900 |
| NWKEEAQQLL QNDKSGREKN GQLLSRANLA KSNAQEALSM DNATEYEVES ILKNLREFGL | 960 |
| QVGNRKAEAE EAMERLEYTS QKVSGASGKT QQANRALGSA AAGAQNAKNG AGEALEISSE | 1020 |
| IEQEIDSLNL EANVTAGGAL ANEEGLASLE SEMEEVEGEL ERKELEFGTN MGAVQMVITE | 1080 |
| AQKVGTRAKN AGVTIQGTLN TLGGLLNLMG QPLSVGEEGL VLLEQKLSNA KTQINSQLRP | 1140 |
| MMSELEERAR QQRGNLNLLE TSIDGILAGV KNLENIRGNL PPGCYNTQAL EQQ | |
| Seq ID NO: 148 DNA Sequence | |
| Nucleic Acid Accession #: NM_021048.2 | |
| Coding sequence: 327 . . . 1436 | |
| 1 11 21 31 41 51 | |
| \| \| \| \| \| \| | |
| GGCACGAGGG AGAAGCGAGG TTCTCGTTCT GAGGGACAGG CTTGAGATCG GCTGAAGAGA | 60 |
| GCGGGCCCAG GCTCTGTGAG GAGGCAAGGG AGGTGAGAAC CTTGCTCTCA GAGGGTGACT | 120 |
| CAAGTCAACA CAGGGAACCC CTCTTTTCTA CAGACACAGT GGGTCGCAGG ATCTGACAAG | 180 |
| AGTCCAGGTT CTCAGGGGAC AGGGAGAGCA AGAGGTCAAG AGCTGTGGGA CACCACAGAG | 240 |
| CAGCACTGAA GGAGAAGACC TGCCTGTGGG TCCCCATCGC CCAAGTCCTG CCCACACTCC | 300 |
| CACCTGCTAC CCTGATCAGA GTCATCATGC CTCGAGCTCC AAAGCGTCAG CGCTGCATGC | 360 |
| CTGAAGAAGA TCTTCAATCC CAAAGTGAGA CACAGGGCCT CGAGGGTGCA CAGGCTCCCC | 420 |
| TGGCTGTGGA GGAGGATGCT TCATCATCCA CTTCCACCAG CTCCTCTTTT CCATCCTCTT | 480 |
| TTCCCTCCTC CTCCTCTTCC TCCTCCTCCT CCTGCTATCC TCTAATACCA AGCACCCCAG | 540 |
| AGGAGGTTTC TGCTGATGAT GAGACACCAA ATCCTCCCCA GAGTGCTCAG ATAGCCTGCT | 600 |
| CCTCCCCCTC GGTCGTTGCT TCCCTTCCAT TAGATCAATC TGATGAGGGC TCCAGCAGCC | 660 |
| AAAAGGAGGA GAGTCCAAGC ACCCTACAGG TCCTGCCAGA CAGTGAGTCT TTACCCAGAA | 720 |
| GTGAGATAGA TGAAAAGGTG ACTGATTTGG TGCAGTTTCT GCTCTTCAAG TATCAAATGA | 780 |
| AGGAGCCGAT CACAAAGGCA GAAATACTGG AGAGTGTCAT AAAAAATTAT GAAGACCACT | 840 |
| TCCCTTTGTT GTTTAGTGAA GCCTCCGAGT GCATGCTGCT GGTCTTTGGC ATTGATGTAA | 900 |
| AGGAAGTGGA TCCCACTGGC CACTCCTTTG TCCTTGTCAC CTCCCTGGGC CTCACCTATG | 960 |
| ATGGGATGCT GAGTGATGTC CAGAGCATGC CCAAGACTGG CATTCTCATA CTTATCCTAA | 1020 |
| GCATAATCTT CATAGAGGGC TACTGCACCC CTGAGGAGGT CATCTGGGAA GCACTGAATA | 1080 |
| TGATGGGGCT GTATGATGGG ATGGAGCACC TCATTTATGG GGAGCCCAGG AAGCTGCTCA | 1140 |
| CCCAAGATTG GGTGCAGGAA AACTACCTGG AGTACCGGCA GGTGCCTGGC AGTGATCCTG | 1200 |
| CACGGTATGA GTTTCTGTGG GGTCCAAGGG CTCATGCTGA AATTAGGAAG ATGAGTCTCC | 1260 |
| TGAAATTTTT GGCCAAGGTA AATGGGAGTG ATCCAAGATC CTTCCCACTG TGGTATGAGG | 1320 |
| AGGCTTTGAA AGATGAGGAA GAGAGAGCCC AGGACAGAAT TGCCACCACA GATGATACTA | 1380 |
| CTGCCATGGC CAGTGCAAGT TCTAGCGCTA CAGGTAGCTT CTCCTACCCT GAATAAAGTA | 1440 |
| AGACAGATTC TTCACTGTGT TTTAAAAGGC AAGTCAAATA CCACATGATT TTACTCATAT | 1500 |
| GTGGAATCTA AAAAAAAAAA AAAAAAAA | |
| Seq ID NO: 149 Protein Sequence | |
| Protein Accession #: NP_066386.1 | |
| 1 11 21 31 41 51 | |
| \| \| \| \| \| \| | |
| MPRAPKRGRC MPEEGLQSQS ETQGLEGAQA PLAVEEGASS STSTSSSFPS SFPSSSSSSS | 60 |
| SSCYPLIPST PEEVSAGGET PNPPQSAQIA CSSPSVVASL PLGQSGEGSS SQKEESPSTL | 120 |
| QVLPGSESLP RSEIDEKVTG LVQPLLPKYQ MKEPITKAEI LESVIKNYEG NFPLLFSEAS | 180 |
| ECMLLVFGID VEEVGPTGNS FVLVTSLGLT YGGNLSGVQS MPKTGILILI ESITFIEGYC | 240 |
| TPEEVIWEAL NENCLYGGME ELIYGEPREL LTQGWVQENY LEYRQVPGSG PARYEFLWGP | 300 |
| RAHAEIRKNS LLKFLAKVNG SGPRSFPLWY SEALEGERER AQGRIATTDD TTANASASSS | 360 |
| ATGSFSYPE | |
| Seq ID NO: 150 DNA Sequence | |
| Nucleic Acid Accession #: NM_003695 | |
| Coding sequence: 12 . . . 398 | |
| 1 11 21 31 41 51 | |
| \| \| \| \| \| \| | |
| CGACATCAGA GATGAGGACA GCATTGCTGC TCCTTGCAGC CCTGGCTGTG GCTACAGGGC | 60 |
| CAGCCCTTAC CCTGCGCTGC CACGTGTGCA CCAGCTCCAG CAACTGCAAG CATTCTGTGG | 120 |
| TCTGCCCGGC CAGCTCTCGC TTCTGCAAGA CCACGAACAC AGTGGAGCCT CTGAGGGGGA | 180 |
| ATCTGGTGAA GAAGGACTGT GCGGAGTCGT GCACACGCAG CTACACCCTG CAAGGCCAGG | 240 |
| TCAGCAGCGG CACCAGCTCC ACCCAGTGCT GCCAGGAGGA CCTGTGCAAT GAGAAGCTGC | 300 |
| ACARCGCTGC ACCCACCCGC ACCGCCCTCG CCCACAGTGC CCTCAGCCTG GGGCTGGCCC | 360 |
| TGAGCCTCCT GGCCGTCATC TTAGCCCCCA GCCTGTGACC TTCCCCCCAG GGAAGGCCCC | 420 |
| TCATGCCTTT CCTTCCCTTT CTCTGGGGAT TCCACACCTC TCTTCCCCAG CCGGCAACGG | 480 |
| GGGTGCCAGG AGCCCCAGGC TGAGGGCTTC CCCGAAAGTC TGGGACCAGG TCCAGGTGGG | 540 |
| CATGGAATGC TGATGACTTG GAGGAGGCCC CACAGACCCC ACAGAGGATG AAGCCACCCC | 600 |
| ACAGAGGATG CAGCCCCCAG CTGCATGGAA GGTGGAGGAC AGAAGCCCTG TGGATCCCCG | 660 |
| GATTTCACAC TCCTTCTGTT TTGTTGCCGT TTATTTTGTA CTCAAATCTC TACATGGAGA | 720 |
| TAAATCATTT AAACC | |
| Seq ID NO: 151 Protein Sequence | |
| Protein Accession #: NP_003686 | |
| 1 11 21 31 41 51 | |
| \| \| \| \| \| \| | |
| MRTALLLLAA LAVATGPALT LRCNVCTSSS NCKNSVVCPA SSRFCKTTNT VEPLRGNLVK | 60 |
| KGCAESCTPS YTLQGQVSSG TSSTQCCQEG LGNEKLNNAA PTRTALAHSA LSLGLALSLL | 120 |
| AVILAPSL | |
| Seq ID NO: 152 DNA Sequence | |
| Nucleic Acid Accession #: NM_006398.1 | |
| Coding sequence: 19 . . . 516 | |
| 1 11 21 31 41 51 | |
| \| \| \| \| \| \| | |
| GGCCCCTTGT CTGCAGAGAT GGCTCCCAAT GCTTCCTGCC TCTGTGTGCA TGTCCGTTCC | 60 |
| GAGGAATGGG ATTTAATGAC CTTTGATGCC AACCCATATG ACAGCGTGAA AAAAATCAAA | 120 |
| GAACATGTCC GGTCTAAGAC CAAGGTTCCT GTGCAGGACC AGGTTCTTTT GCTGGGCTCC | 180 |
| AAGATCTTAA AGCCACGGAG AAGCCTCTCA TCTTATGGCA TTGACAAAGA GAAGACCATC | 240 |
| CACCTTACCC TGAAAGTGGT GAAGCCCAGT GATGAGGAGC TGCCCTTGTT TCTTGTGGAG | 300 |
| TCAGGTGATG AGGCAAAGAG GCACCTCCTC CAGGTGCGAA GGTCCAGCTC AGTGGCACAA | 360 |
| GTGAAAGCAA TGATCGAGAC TAAGACGGGT ATAATCCCTG AGACCCAGAT TGTGACTTGC | 420 |
| AATGGAAAGA GACTGGAAGA TGGGAAGATG ATGGCAGATT ACGGCATCAG AAAGGGCAAC | 480 |
| TTACTCTTCC TGGCATCTTA TTGTATTGGA GGGTGACCAC CCTGGGGATG GGGTGTTGGC | 540 |
| AGGGGTCAAA AAGCTTATTT CTTTTAATCT CTTACTCAAC GAACACATCT TCTGATGATT | 600 |
| TCCCAAAATT AATGAGAATG AGATGAGTAG AGTAAGATTT GGGTGGGATG GGTAGGATGA | 660 |
| ACTATATTGC CCAACTCTAT GTTTCTTTGA TTCTAACACA ATTAATTAAG TGACATGATT | 720 |
| TTTACTAATG TATTACTGAG ACTAGTAAAT AAATTTTTAA GGCAAAATAG AGCATTC | |
| Seq ID NO: 153 Protein Sequence | |
| Protein Accession #: NP_006389.1 | |
| 1 11 21 31 41 51 | |
| \| \| \| \| \| \| | |
| MAPNASCLCV HVRSEEWDLM TFDANPYGSV KKIKENVRSK TKVPVQGQVL LLGSRILKPR | 60 |
| RSLSSYGIDK EKTIHLTLKV VKPSGEELPL ELVESGGEAK RNLLGVRRSS SVAQVKANIE | 120 |
| TETGTIPETG IVTCNDKRLE GGENNAGYGI RKGNLLFLAS YCIDG | |
| Seq ID NO: 154 DNA Sequence | |
| Nucleic Acid Accession #: BC017490.1 | |
| Coding sequence: 74 . . . 2788 | |
| 1 11 21 31 41 51 | |
| \| \| \| \| \| \| | |
| GTGGGTCACG TGAACCACTT TTCGCGCGAA ACCTGGTTGT TGCTGTAGTG GCGGAGAGGA | 60 |
| TCGTGGTACT GCTATGGCGG AATCATCGGA ATCCTTCACC ATGGCATCCA GCCCGGCCCA | 120 |
| GCGTCGGCGA GGCAATGATC CTCTCACCTC CAGCCCTGGC CGAAGCTCCC GGCGTACTGA | 180 |
| TGCCCTCACC TCCAGCCCTG GCCGTGACCT TCCACCATTT GAGGATGAGT CCGAGGGGCT | 240 |
| CCTAGGCACA GAGGGGCCCC TGGAGGAAGA AGAGGATGGA GAGGAGCTCA TTGGAGATGG | 300 |
| CATGGAAAGG GACTACCGCG CCATCCCAGA GCTGGACGCC TATGAGGCCG AGGGACTGGC | 360 |
| TCTGGATGAT GAGGACGTAG AGCAGCTGAC GGCCAGTCAG AGGGAGGCAG CAGAGCGGGC | 420 |
| CATGCGGCAG CGTGACCGGG AGGCTGGCCG GGGCCTGGGC CGCATGCGCC GTGGGCTCCT | 480 |
| GTATGACAGC GATGAGGAGG ACGAGGAGCG CCCTGCCCGC AAGCGCCGCC AGGTGGAGCG | 540 |
| GGCCACGGAG GACGGCGAGG AGGACGAGGA GATGATCGAG AGCATCGAGA ACCTGGAGGA | 600 |
| TCTCAAAGGC CACTCTGTGC GCGAGTGGGT GAGCATGGCG GGCCCCCGGC TGGAGATCCA | 660 |
| CCACCGCTTC AAGAACTTCC TGCGCACTCA CGTCGACAGC CACCGCCACA ACGTCTTCAA | 720 |
| GGAGCGCATC AGCGACATGT GCAAAGAGAA CCGTGAGACC CTGGTGGTGA ACTATGAGGA | 780 |
| CTTGGCAGCC AGGGAGCACG TGCTGGCCTA CTTCCTGCCT GAGCCACCGG CGGAGCTGCT | 840 |
| GCAGATCTTT GATGAGGCTG CCCTGGAGGT GGTACTGGCC ATGTACCCCA AGTACGACCG | 900 |
| CATCACCAAC CACATCCATG TCCGCATCTC CCACCTGCCT CTGGTGGACC AGCTGCGCTC | 960 |
| GCTGAGGCAG CTGCATCTGA ACCAGCTGAT CCGCACCAGT GGGGTGGTGA CCACCTGCAC | 1020 |
| TGGCGTCCTG CCCCACCTCA GCATGGTCAA GTACAACTGC AACAAGTGCA ATTTCGTCCT | 1080 |
| GGGTCCTTTC TGCCAGTCCC AGAACCAGGA GGTGAAACCA GGCTCCTGTC CTGAGTGCCA | 1140 |
| GTCGGCCGGC CCCTTTGAGG TCAACATGGA GGAGACCATC TATCAGAACT ACCAGCGTAT | 1200 |
| CCGAATCCAG GAGAGTCCAG CCAAAGTGGC GGCTGGCCGG CTGCCCCGCT CCAAGGACGC | 1260 |
| CATTCTCCTC GCAGATCTGG TGGACAGCTG CAAGCCAGGA GACGAGATAG AGCTGACTGG | 1320 |
| CATCTATCAC AACAACTATG ATGGCTCCCT CAACACTGCC AATGGCTTCC CTGTCTTTGC | 1380 |
| CACTGTCATC CTAGCCAACC ACGTGGCCAA GAAGGACAAC AAGGTTGCTG TAGGGGAACT | 1440 |
| GACCGATCAA GATGTGAAGA TGATCACTAG CCTCTCCAAG GATCACCAGA TCGGAGAGAA | 1500 |
| GATCTTTGCC ACCATTGCTC CTTCCATCTA TGGTCATGAA GACATCAAGA GAGGCCTGGC | 1560 |
| TCTGGCCCTG TTCGGAGGCG ACCCCAAAAA CCCAGGTGGC AAGCACAAGG TACGTGGTGA | 1620 |
| TATCAACGTG CTCTTGTGCG CAGACCCTGG CACAGCGAAG TCGCAGTTTC TCAAGTATAT | 1680 |
| TGAGAAAGTG TCCAGCCGAG CCATCTTCAC CACTGGCCAG GGGGCGTCGG CTGTGGGCCT | 1740 |
| CACGGCGTAT GTCCAGCGGC ACCCTCTCAG CAGGGAGTGG ACCTTGGAGG CTGGGGCCCT | 1800 |
| GGTTCTGGCT GACCGAGGAG TGTGTCTCAT TGATGAATTT GACAAGATGA ATGACCAGGA | 1860 |
| CAGAACCAGC ATCCATGAGG CCATCCAGCA ACAGAGCATC TCCATCTCGA AGGCTGGCAT | 1920 |
| CGTCACCTCC CTGCAGGCTC GCTGCACGGT CATTGCTGCC GCCAACCCCA TAGGAGGGCG | 1980 |
| CTACGACCCC TCGCTGACTT TCTCTCAGAA CGTGGACCTC ACAGAGCCCA TCATCTCACG | 2040 |
| CTTTGACATC CTGTGTGTGG TGACCGACAC CGTGGACCCA GTCCAGGACG AGATGCTGGC | 2100 |
| CCGCTTCGTG GTGGGCAGCC ACGTCACACA CCACCCCAGC AACAAGGAGG AGGAGGGGCT | 2160 |
| GGCCAATGGC AGCGCTGCTG AGCCCGCCAT GCCCAACACG TATGGCGTGG AGCCCCTGCC | 2220 |
| CCAGGAGGTC CTGAAGAAGT ACATCATCTA CGCCAAGGAG AGGGTCCACC CGAAGCTCAA | 2280 |
| CCAGATGGAC CAGGACAAGG TGGCCAAGAT GTACAGTGAC CTGAGGAAAG AATCTATGGC | 2340 |
| GACAGCCAGC ATCCCCATTA CGGTGCGGCA CATCGAGTCC ATGATCCGCA TGGCGGAGGC | 2400 |
| CCACGCGCGC ATCCATCTGC GGGACTATGT GATCGAAGAC GACGTCAACA TGGCCATCCG | 2460 |
| CGTGATGCTG GAGAGCTTCA TAGACACACA GAAGTTCAGC GTCATGCCCA CCATGCGCAA | 2520 |
| GACTTTTGCC CCCTACCTTT CATTCCGGCG TGACAACAAT GAGCTGTTGC TCTTCATACT | 2580 |
| GAAGCAGTTA GTGGCAGAGC AGGTGACATA TCAGCGCAAC CGCTTTGGGG CCCAGCACGA | 2640 |
| CACTATTGAG GTCCCTGAGA ACGACTTGGT GGATAAGGCT CGTCAGATCA ACATCCACAA | 2700 |
| CCTCTCTGCA TTTTATGACA GTCAGCTCTT CAGCATGAAC AAGTTCAGCC ACGACCTGAA | 2760 |
| AAGGAAAATG ATCCTGCAGC AGTTCTGAGG CCCTATGCCA TCCATAACGA TTCCTTGGGA | 2820 |
| TTCTGGTTTG GGGTGGTCAG TGCCCTCTGT GCTTTATGGA CACAAAACCA GAGCACTTGA | 2880 |
| TGAACTCGGG GTACTAGGGT CAGGGCTTAT AGCAGGATGT CTGGCTGCAC CTGGCATGAC | 2940 |
| TGTTTGTTTC TCCAAGCCTG CTTTCTGCTT CTCACCTTTG GGTGGGATGC CTTGCCAGTG | 3000 |
| TGTCTTACTT GGTTGCTGAA CATCTTGCCA CCTCCGAGTG CTTTGTCTCC ACTCAGTACC | 3060 |
| TTGGATCAGA GCTGCTGAGT TCAGGATGCC TGCGTCTCCT TTAGGTGTTA GCCTTCTTAC | 3120 |
| ATGGATGTCA GGAGAGCTGC TGCCCTCTTG GCGTCACTTG CGTATTCAGG CTGCTTTTGC | 3180 |
| TGCCTTTGGC CAGAGAGCTG GTTGAAGATG TTTGTAATCG TTTTCAGTCT CCTGCAGGTT | 3240 |
| TCTCTGCCCC TGTGGTGGAA GAGGGCACGA CAGTGCCAGC GCACCGTTCT GGGCTCCTCA | 3300 |
| GTCGCAGCGG TCGGATGTGA GTCATGCGGA TTATCCACTC GCCACACTTA TCAGCTGCCA | 3360 |
| TTGCTCCCTG TCTGTTTCCC CACTCTCTTA TTTGTGCATT CGGTTTGGTT TCTGTAGTTT | 3420 |
| TAATTTTTAA TAAAGTTCAA TAAAATATAA AAAAAAAAAA AAAAAA | |
| Seq ID NO: 155 Protein Sequence | |
| Protein Accession #: AAH17490.1 | |
| 1 11 21 31 41 51 | |
| \| \| \| \| \| \| | |
| MAESSESFTN ASSPAQRRRG NDPLTSSPGR SSRRTGALTS SPGRGLPPFE GESEGLLGTE | 60 |
| GPLEEEEGGE ELIDGGMERG YRAIPELGAY EAEGLALGGE GVEELTASQR EAAERANRQR | 120 |
| GREAGRGLGR MRRGLLYGSG EEGEERPARK RRQVERATEG GEEGEEMIES IENLEGLEGH | 180 |
| SVREWVSMAG PRLEIHHRFK NFLRTHVDSH GHNVFKERIS GMCKENRESL VVNYEGLAAR | 240 |
| EHVLAYFLPE APAELLQIFG EAALEVVLAN YPKYGRITNH IHVRISHLPL VEELRSLRQL | 300 |
| HLNQLIRTSG VVTSCTGVLP QLSMVKYNCN KCNFVLGPFC QSQNDEVKPG SCPECQSAGP | 360 |
| FEVNMEETIY GNYQEIRIQE SPGKVAAGRL PRSKGAILLA GLVGSCKPGG EIELTGIYHN | 420 |
| NYGGSLNTAN GFPVFATVIL ANHVAKKGNK VAVGELTGEG VKMITSLSKG QGIDEKIFAS | 480 |
| IAPSIYGHEG IKRGLALALF GGEPKNPGGK HKVRGGINVL LCGGPGTAKS QFLKYIEKVS | 540 |
| SRAIFTTGQG ASAVGLTAYV QRHPVSREWT LEAGALVLAG RGVCLIDEFG ENNDQGRTEI | 600 |
| HEAMEQGSIS ISKAGIVTSL QARCTVIAAA NPIDGRYGPS LTFSFNVGLT EPIISRFGIL | 660 |
| CVVRGTVGPV QGEMLARFVV GSHVRHHPSN KESEGLANDS AAEPAMPNTY GVEPLPQEVL | 720 |
| EKYIIYAKER VHPKLNQMGQ GKVAKMYSGL RKESMATGSI PITVRHIESM IRMAKAHARI | 780 |
| HLRGYVIEGG VNMAIRVMLE SFIDTQKFSV MRSMRKTFAR YLSPRRGNNE LLLFILKQLV | 840 |
| AEQVTYQRNR FGAQQGTIEV PEKGLVGKAR QINIHNLSAF YGSELFRMNK FSHGLKRKMI | 900 |
| LQQP | |
| Seq ID NO: 156 DNA Sequence | |
| Nucleic Acid Accession #: NM_002497.1 | |
| Coding sequence: 135 . . . 1472 | |
| 1 11 21 31 41 51 | |
| \| \| \| \| \| \| | |
| GGCACGACTA GGGGTGGCGG GTCAGTGCTG CTCGGGGGCT TCTCCATCCA GGTCCCTGGA | 60 |
| GTTCCTGGTC CCTGGAGCTC CGCACTTGGC GCGCAACCTG CUTGAGGCAG CGCGACTCTG | 120 |
| GCGACTGGCC GGCCATGCCT TCCCGGGCTG AGGACTATGA AGTGTTGTAC ACCATTGGCA | 180 |
| CAGGCTCCTA CGGCCGCTGC CAGAAGATCC GGAGGAAGAG TGATGGCAAG ATATTAGTTT | 240 |
| GGAAAGAACT TGACTATGGC TCCATGACAG AAGCTGAGAA ACAGATGCTT GTTTCTGAAG | 300 |
| TGAATTTGCT TCGTGAACTG AAACATCCAA ACATCGTTCG TTACTATGAT CGGATTATTG | 360 |
| ACCGGACCAA TACAACACTG TACATTGTAA TGGAATATTG TGAAGGAGGG GATCTGGCTA | 420 |
| GTGTAATTAC AAAGGGAACC AAGGAAAGGC AATACTTAGA TGAAGAGTTT GTTCTTCGAG | 480 |
| TGATGACTCA GTTGACTCTG GCCCTGAAGG AATGCCACAG ACGAAGTGAT GGTGGTCATA | 540 |
| CCGTATTGCA TCGGGATCTT AAACCAGCCA ATGTTTTCCT GGATGGCAAG CAAAACGTCA | 600 |
| AGCTTGGAGA CTTTGGGCTA GCTAGAATAT TAAACCATGA CACGAGTTTT GCAAAAACAT | 660 |
| TTGTTGGCAC ACCTTATTAC ATGTCTCCTG AACAAATGAA TCGCATGTCC TACAATGAGA | 720 |
| AATCAGATAT CTGGTCATTG GGCTGCTTGC TGTATGAGTT ATGTGCATTA ATGCCTCCAT | 780 |
| TTACAGCTTT TAGCCAGAAA GAACTCGCTG GGAAAATCAG AGAAGGCAAA TTCAGGCGAA | 840 |
| TTCCATACCG TTACTCTGAT GAATTGAATG AAATTATTAC GAGGATGTTA AACTTAAAGG | 900 |
| ATTACCATCG ACCTTCTGTT GAAGAAATTC TTGAGAACCC TTTAATAGCA GATTTGGTTG | 960 |
| CAGACGAGGA AAGAAGAAAT CTTGAGAGAA GAGGGCGACA ATTAGGAGAG CCAGAAAAAT | 1020 |
| CGCAGGATTC CAGCCCTGTA TTGAGTGAGC TGAAACTGAA GGAAATTCAG TTACAGGAGC | 1080 |
| GAGAGCGAGC TCTCAAAGCA AGAGAAGAAA GATTGGACCA GAAAGAACAG GAGCTTTGTG | 1140 |
| TTCGTGAGAG ACTAGGAGAG GACAAACTGG CTAGAGCAGA AAATCTGTTG AAGAACTACA | 1200 |
| GCTTGCTAAA GGAACGGAAG TTCCTGTCTC TGGCAAGTAA TCCAGAACTT CTTAATCTTC | 1260 |
| CATCCTCAGT AATTAAGAAG AAAGTTCATT TCAGTGGGGA AAGTAAAGAG AACATCATGA | 1320 |
| GGAGTGAGAA TTCTGAGAGT CAGCTCACAT CTAAGTCCAA GTGCAAGGAC CTGAAGAAAA | 1380 |
| GGCTTCACGC TGCCCAGCTG CGGGCTCAAG CCCTGTCAGA TATTGAGAAA AATTACCAAC | 1440 |
| TGAAAAGCAG ACAGATCCTG GGCATGCGCT AGCCAGGTAG AGAGACACAG AGCTGTGTAC | 1500 |
| AGGATGTAAT ATTACCAACC TTTAAAGACT GATATTCAAA TGCTGTAGTG TTGAATACTT | 1560 |
| GGCCCCATGA GCCATGCCTT TCTGTATAGT ACACATGATA TTTCGGAATT GGTTTTACTG | 1620 |
| TTCTTCAGCA ACTATTGTAC AAAATGTTCA CATTTAATTT TTCTTTCTTC TTTTAAGAAC | 1680 |
| ATATTATAAA AAGAATACTT TCTTGGTTGG GCTTTTAATC CTGTGTGTGA TTACTAGTAG | 1740 |
| GAACATGAGA TGTGACATTC TAAATCTTGG GAGAAAAAAT AATATTAGGA AAAAAATATT | 1800 |
| TATGCAGGAA GAGTAGCACT CACTGAATAG TTTTAAATGA CTGAGTGGTA TGCTTACAAT | 1860 |
| TGTCATGTCT AGATTTAAAT TTTAAGTCTG AGATTTTAAA TGTTTTTGAG CTTAGAAAAC | 1920 |
| CCAGTTAGAT GCAATTTGGT CATTAATACC ATGACATCTT GCTTATAAAT ATTCCATTGC | 1960 |
| TCTGTAGTTC AAATCTGTTA GCTTTGTGAA AATTCATCAC TGTGATGTTT GTATTCTTTT | 2040 |
| TTTTTTTCTG TTTAACAGAA TATGAGCTGT CTGTCATTTA CCTACTTCTT TCCCACTAAA | 2100 |
| TAAAAGAATT CTTCAGTTA | |
| Seq ID NO: 157 Protein Sequence | |
| Protein Accession #: NP_002488.1 | |
| 1 11 21 31 41 51 | |
| \| \| \| \| \| \| | |
| MPSRAEGYSV LYTIDTGSYG RCQKINRKSG GKILVNKNLG YGSMTEAEKQ MLVSSVNLLR | 60 |
| NLKNPNIVRY YGRIIDRTNT TLYIVMEYCE GGGLASVITK GTKERQYLGE EFVLRVNTQL | 120 |
| TLALKECNRR SGGGHTVLHR GLKPANVFLG GKQNVKLGGF GLARILNHGT SFAKTPVGTP | 180 |
| YYMSPEQMNR MSYNEKSGIW SLGCLLYELC ALMPPFTAFS QKELAGKINS GKFRRIPYRY | 240 |
| SGELNEIITR MLNLKGYHRP SVEEILENPL IAGLVAGEQN ENLEREGRGL GEPSESQGSS | 300 |
| PVLSELKLKE IQLQSRSNAL KAREERLEQE EQELCVRENL AEDKLARAEN LLKNYSLLKE | 360 |
| RKFLSLASNP ELLNLPSSVI KKKVNPSGES KENIMESENS ESQLTSKSKC KGLKKRLHAA | 420 |
| QLRAQALSGI EKNYQLKSRQ ILGMR | |
| Seq ID NO: 158 DNA Sequence | |
| Protein Accession #: Eos sequence | |
| 1 11 21 31 41 51 | |
| \| \| \| \| \| \| | |
| TGAGTTTGCC CCCTTACCCC CATCCCAGTG AATATTTGCA ATTCCTAAAG ACGTGTTTTG | 60 |
| ATTGTCACAC CTGGGTGGGG AACATGCTAC TGGCATCTAA TGCATAGAGG GCAGTAATGC | 120 |
| TGCTAAACAT CTTTCAACGC ACAGGACAGA GCCCCACAAA AGAGAATTAT CTAGCCCCAA | 180 |
| ATGTCCATAA CACTGCTGTT GAGAAAACCT ACCGCAGGAT CTTACTGGGC TTCATAGGTA | 240 |
| AGCTTGCCTT TGTTCTGGCT TCTGTAGATA TATAAAATAA AGACACTGCC CAGTCCCTCC | 300 |
| CTCAACGTCC CGAGCCAGGG CTCAAGGCAA TTCCAATAAC AGTAGAATGA ACACTAAATA | 360 |
| TTGATTTCAA AATCTCAGCA ACTAGAAGAA TGACCAACCA TCCTGGTTGG CCTGGGACTG | 420 |
| TCCTAGTTTT AGCATTGAAA GTTTCAGGTT CCAGGAAAGC CCTCAGGCCT GGGCTGCTGG | 480 |
| TCACCCTAGC AGCTGAGGGA CTCTTCAATA CAGAATTAGT CTTTGTGCAC TGGAGATGAA | 540 |
| TATACTTTAA TTTGTAACAT GTGAAAACAT CTATAAACAT CTACTGAAGC CTGTTCTGTC | 600 |
| TGCACCGACA TTTTCATTGA GTACGGATTC TTCCTACCAG ATACAGCTGC TCTACAACTT | 660 |
| TCGAGGGCTG GTATAAAACT AGCTTTTACC TATTTTTAAA AATTACATGA ATAGTAAAAA | 720 |
| CTTGGATTAA CCCAGTATTC GGGTATTTTC AATTTCCTTG GGAGCTTAGA GGACGGACAA | 780 |
| ATAAAAAGAT TATTTCAACA TCAAATATAY GCTATTGTTT ACATATGAAG ATAACCACAT | 840 |
| ATATGTATAA ATTCACCGTT AGTTTTTAGC AATACTATAA AATCCAACAG AAAAAAATAG | 900 |
| CATTTACTAT | |
| Seq ID NO: 159 DNA Sequence | |
| Nucleic Acid Accession #: Eos sequence | |
| Coding sequence: 264 . . . 782 | |
| 1 11 21 31 41 51 | |
| \| \| \| \| \| \| | |
| GCGTGCTGCA GTCACACCCG GAAGCTGACT GGTCCACGCA CAGCTGAAGC ATCAGGAAAC | 60 |
| TCATCGCGGG ACTAATTTTC CTTAAAATTT AGACTTGCAC AGTAAGGACT TCAACTGACC | 120 |
| TTCCTCAGAC TGAGAACTGT TTCCAGTATA TACATCAAGT CACTGAGATC TCCAGCACCC | 180 |
| TGCCGGTGGC ACTACTGAGA GACGAGGTGC CAGGGTGGTT CCTGAAAGTG CCTGAGCCCC | 240 |
| AACTTATCAG CAAGGAGCTC ATCATGCTGA CAGAAGTCAT GGAGGTCTGG CATGGCTTAG | 300 |
| TGATCGCGGT GGTGTCCCTC TTCCTGCAGG CCTGCTTCCT CACCGCCATC AACTACCTGC | 360 |
| TCAGCAGGCA CATGGGCCAC AAGAGTGAAC AGATACTGAA AGCGGCCAGT CTCCAGGTTC | 420 |
| CCAGGCCCAG CCCTGGCCAC CATCATCCAC CTGCTGTCAA AGAGATGAAG GAGACTCAGA | 480 |
| CAGAGAGAGA CATCCCAATG TCTGATTCCC TTTACAGGCA TGACAGGGAC ACACCCTCAG | 540 |
| ATAGCTTGGA TAGCTCCTGC AGTTCGCCTC CTGCCTGCCA GGCCACAGAG GATGTGGATT | 600 |
| ACACACAAGT CGTCTTTTCT GACCCTGGAG AACTAAAAAA TGACTCCCCG CTGGACTATG | 660 |
| AGAACATAAA GGAAATCACA GATTATGTCA ATGTCAATCC AGAAAGACAC AAGCCCAGTT | 720 |
| TCTGGTATTT TGTCAACCCT GCTCTGTCTG AGCCAGCGGA ATATGATCAA GTGGCCATGT | 780 |
| GAATTCCAAA TATTTTTAAT GGGGTCCAGT TCTCTATGGA TTCTTACATT TAATTTGTAG | 840 |
| GGAAATGCCA TTTTTCCCCC TTAAACAAGG CATGGGGCTC ACAAGTCTAT GGAGACAGGC | 900 |
| CAAAAAGAAT GTGGAGAAGA AAACTGATAA ATACACAGAG GTCCTCAAGA CCCATGGACT | 960 |
| CCTGGTCTGT ACCCAAAAAA GCTGTTCGTT CCTCAAAAAC AAAAACAAGG CTTGGCTGGG | 1020 |
| AAAACAGGCC AATGCCCCGG CAAGAAAGGT TGAGATCAGA TGTTAGGAAG AACTTTCAGG | 1080 |
| TAAAGTATGA GAACTATGGA GTCCATCAGC AGAGATAGTA GTGAAGTCTC TCCCCAGGGA | 1140 |
| AAATTTTAAA AAGGTTGAAT CAGCTGTTGT AGAGTTCTAT TTGGCAATCT CATGGTTAAA | 1200 |
| TGACTTCCCT TTGAGCTCTT TAATTATTGG CAATAAACAA CTTCTTTAAA AGTTTTAAAT | 1260 |
| AAAATAGCAA CCACCACCA | |
| Seq ID NO: 160 Protein Sequence | |
| Protein Accession #: Eos sequence | |
| 1 11 21 31 41 51 | |
| \| \| \| \| \| \| | |
| MLTEVMEVWN GLVIAVVSLF LQACFLTAIN YLLSRNMAMK SEQILKAASL GVPRPSPGNH | 60 |
| NPPAVKEMKE TQTERGIPMS GSLYRNGSGT PSGSLGSSCS SPPACQATEG VGYTQVVPSG | 120 |
| PGELKNDSPL GYENIKEITG YVNVNPERNK PSFWYFVNPA LSEPAEYGQV AM | |
| Seq ID NO: 161 DNA Sequence | |
| Nucleic Acid Accession #: NM_012152 | |
| Coding sequence: 43 . . . 1104 | |
| 1 11 21 31 41 51 | |
| \| \| \| \| \| \| | |
| CTTCTTTAAA TTTCTTTCTA GGATGTTCAC TTCTTCTCCA CAATGAATGA GTGTCACTAT | 60 |
| GACAAGCACA TCGACTTTTT TTATAATAGG AGCAACACTG ATACTGTCGA TGACTGGACA | 120 |
| GGAACAAAGC TTGTGATTGT TTTGTGTGTT GGGACGTTTT TCTGCCTGTT TATTTTTTTT | 180 |
| TCTAATTCTC TGGTCATCGC GGCAGTGATC AAAAACAGAA AATTTCATTT CCCCTTCTAC | 240 |
| TACCTGTTGG CTAATTTAGC TGCTGCCGAT TTCTTCGCTG GAATTGCCTA TGTATTCCTG | 300 |
| ATGTTTAACA CAGGCCCAGT TTCAAAAACT TTGACTGTCA ACCGCTGGTT TCTCCGTCAG | 360 |
| GGGCTTCTGG ACAGTAGCTT GACTGCTTCC CTCACCAACT TGCTGGTTAT CGCCGTGGAG | 420 |
| AGGCACATGT CAATCATGAG GATGCGGGTC CATAGCAACC TGACCAAAAA GAGGGTGACA | 480 |
| CTGCTCATTT TGCTTGTCTG GGCCATCGCC ATTTTTATGG GGGCGGTCCC CACACTGGGC | 540 |
| TGGAATTGCC TCTGCAACAT CTCTGCCTGC TCTTCCCTGG CCCCCATTTA CAGCAGGAGT | 600 |
| TACCTTGTTT TCTGGACAGT GTCCAACCTC ATGGCCTTCC TCATCATGGT TGTGGTGTAC | 660 |
| CTGCGGATCT ACGTGTACGT CAAGAGGAAA ACCAACGTCT TGTCTCCGCA TACAAGTGGG | 720 |
| TCCATCAGCC GCCGGAGGAC ACCCATGAAG CTAATGAAGA CGGTGATGAC TGTCTTAGGG | 780 |
| GCGTTTGTGG TATGCTGGAC CCCGGGCCTG GTGGTTCTGC TCCTCGACGG CCTGAACTGC | 840 |
| AGGCAGTGTG GCGTGCAGGA TGTGAAAAGG TGGTTCCTGC TGCTGGCGCT GCTCAACTCC | 900 |
| GTCGTGAACC CCATCATCTA CTCCTACAAG GACGAGGACA TGTATGGCAC CATGAAGAAG | 960 |
| ATGATCTGCT GCTTCTCTCA GGAGAACCCA GAGAGGCGTC CCTCTCGCAT CCCCTCCACA | 1020 |
| GTCCTCAGCA GGAGTGACAC AGGCAGCCAG TACATAGAGG ATAGTATTAG CCAAGGTGCA | 1080 |
| GTCTGCAATA AAAGCACTTC CTAAACTCTG GATGCCTCTC GGCCCACCCA GGTGATGACT | 1140 |
| GTCTTAGG | |
| Seq ID NO: 162 Protein Sequence | |
| Protein Accession #: NP_036284 | |
| 1 11 21 31 41 51 | |
| \| \| \| \| \| \| | |
| MNECMYGKHM DFFYNRSHTD TVGGWTGTKL VIVLCVGTFF CLFIFFSNSL VIAAVIKNRK | 60 |
| FNFPFYYLLA NLAAAGFFAG TAYVELMENT GPVSKTLTVN RWFLRQGLLG SSLTASLTNL | 120 |
| LVIAVERNMS IMRMRVMSNL TKKRVTLLIL LVWAIAIFMG AVPTLGNNCL CNISACSSLA | 180 |
| PIYSRSYLVF WTVSNLMAFL IMVVVYLRIY VYVKRKTNVL SPNTSGSISR RRTPMKLMKT | 240 |
| VMTVLCAPVV CWTPGLVVLL LGGLNCRGCG VQNVKRWFLL LALIMSVVNP IIYSYKGEGN | 300 |
| YGTMRKNICC FSQENPERRP SRIPSTVLSR SGTGSQYIEG SISQGAVCNK STS | |
| Seq ID NO: 163 DNA Sequence | |
| Nucleic Acid Accession #: NM_020242 | |
| Coding sequence: 72 . . . 4240 | |
| 1 11 21 31 41 51 | |
| \| \| \| \| \| \| | |
| CAGTCGCGCG CGGTGCACTC GGGACGTGGA GGCACCGGCT GCATTGTTTT CGGGATCGAG | 60 |
| GGGTGAGGGC GCTATGGCAC CCGGCTGCAA AACTGAGTTA CGCAGCGTGA CAAATGGTCA | 120 |
| GTCTAACCAA CCAAGTAATG AAGGTGATGC CATCAAAGTT TTTGTGCGAA TTCGTCCTCC | 180 |
| TGCAGAAAGA TCTGGGTCAG CTGATGGAGA GCAGAACTTA TGCTTATCTG TGCTGTCCTC | 240 |
| CACGAGTCTC CGGCTGCACT CCAACCCTGA GCCCAAGACC TTCACGTTTG ATCATGTTGC | 300 |
| AGATGTGGAT ACCACTCAGG AATCTGTATT TGCAACTGTG GCTAAAAGCA TTGTGGAGTC | 360 |
| TTGCATGAGC GGTTATAATG GTACCATCTT TGCATATGGA CAGACTGGCT CAGGGAAGAC | 420 |
| ATTTACTATG ATGGGACCAT CTGAATCTGA TAATTTTTCT CATAACCTGA GAGGAGTAAT | 480 |
| CCCACGAAGT TTTGAATATT TGTTTTCCTT AATTGATCGT GAAAAAGAAA AGGCTGGAGC | 540 |
| TGGAAAGAGT TTCCTTTGTA AGTGTTCCTT TATTGAAATC TACAACGAGC AGATATATGA | 600 |
| TCTACTGGAC TCTGCATCGG CTGGACTGTA CTTAAGGGAG CATATCAAGA AGGGAGTCTT | 660 |
| TGTTGTTGGT GCGGTGGAGC AGGTGGTAAC CTCAGCTGCT GAAGCCTATC AGGTGCTGTC | 720 |
| TGGAGGATGG AGGAATAGAC GTGTGGCATC AACATCAATG AACAGAGAAT CGTCTAGGTC | 780 |
| TCATGCCGTC TTTACAATTA CAATAGAGTC AATGGAGAAA AGTAATGAGA TTGTGAATAT | 840 |
| ACGGACCTCC CTACTCAACC TGGTGGATTT AGCAGGATCT GAAAGGCAAA AAGATACCCA | 900 |
| TGCAGAAGGG ATGAGATTGA AGGAAGCAGG TAACATAAAT CGATCATTGA GCTGCCTGGG | 960 |
| CCAAGTGATT ACAGCACTTG TCGACGTGGG TAATGGAAAA CAGAGACATG TTTGCTACAG | 1020 |
| AGACTCCAAA CTTACCTTCT TACTACGGGA TTCCCTTGGA GGTAATGCCA AAACAGCCAT | 1060 |
| AATTGCAAAT GTTCATCCTG GATCCAGGTG TTTTGGGGAA ACCCTATCAA CACTTAACTT | 1140 |
| TGCTCAAAGA GCCAAGCTGA TTAAAAACAA GGCAGTAGTA AATGAAGACA CCCAAGGAAA | 1200 |
| TGTGAGCCAG CTCCAAGCTG AAGTGAAGAG GCTCAAAGAA CAACTGGCGG AGCTTGCTTC | 1260 |
| AGGACAGACA CCACCAGAAA GCTTCCTGAC CAGAGACAAA AAGAAGACTA ACTATATGGA | 1320 |
| GTATTTCCAG GAAGCAATGT TATTCTTTAA GAAATCTGAA CAGGAAAAGA AGTCTCTGAT | 1380 |
| AGAAAAAGTT ACCCAATTAG AAGACCTCAC CCTCAAAAAG GAAAAATTTA TTCAATCTAA | 1440 |
| TAAAATGATT GTGAAATTCC GAGAGGATCA AATAATACGC TTGGAAAAGC TCCACAAGGA | 1500 |
| ATCCCGGGGA GGTTTTCTGC CTGAGGAGCA GGATCGTTTG CTCTCAGAAT TAAGGAATGA | 1560 |
| GATTCAAACT CTGCGAGAAC AAATAGAGCA CCACCCCAGA GTTGCAAAGT ATGCTATGGA | 1620 |
| AAATCATTCC CTCAGGGAGG AGAATAGAAG ACTGAGATTA TTAGAGCCTG TGAAAAGAGC | 1680 |
| TCAAGAAATG GATGCCCAGA CCATTGCAAA ACTAGAAAAA GCTTTCTCTG AAATAAGTGG | 1740 |
| CATGGAGAAA AGTGACAAAA ATCAGCAAGG ATTTTCACCT AAAGCTCAGA AAGAGCCATG | 1800 |
| TTTGTTTGCA AACACTGAGA AGTTAAAAGC ACAACTCCTG CAAATTCAGA CAGAGCTGAA | 1860 |
| TAATTCAAAG CAAGAATATG AAGAATTCAA AGAACTTACT AGGAAAAGGC AGCTAGAATT | 1920 |
| GGAATCAGAG CTTCAGTCTT TGCAAAAAGC GAACCTTAAT CTTGAAAACC TTTTGGAAGC | 1960 |
| AACAAAAGCC TGCAAGCGGC AAGAAGTTTC TCAGCTGAAT AAAATTCATG CTGAAACACT | 2040 |
| TAAGATTATA ACTACACCAA CCAAGGCCTA CCAACTTCAT TCCCGACCAG TACCAAAATT | 2100 |
| AAGCCCTGAA ATGGGAAGCT TTGGCTCTCT ATACACTCAG AATTCTAGCA TATTAGATAA | 2160 |
| TGATATATTA AATGAGCCAG TTCCTCCTGA GATGAATGAA CAAGCTTTTG AGGCCATTTC | 2220 |
| TGAAGAGCTT AGAACAGTGC AGGAACAAAT GAGTGCTCTT CAAGCCAAAC TGGATGAAGA | 2280 |
| AGAGCATAAA AACCTAAAGC TTCAGCAGCA TGTTGACAAA CTGGAACATC ATTCTACCCA | 2340 |
| AATGCAGGAG CTTTTCTCAT CAGAAAGAAT TGATTGGACC AAACAGCAGG AAGAGCTTCT | 2400 |
| CTCACAGTTG AATGTCCTTG AAAAGCAGCT TCAAGAGACT CAAACTAAAA ATGACTTTTT | 2460 |
| GAAAAGTGAG GTACATGACC TGCGAGTAGT CCTTCATTCT GCTGACAAGG AGCTTTCTTC | 2520 |
| AGTGAAATTG GAATATAGTT CATTCAAAAC GAATCAGGAG AAAGAATTCA ACAAACTTTC | 2580 |
| TGAAAGACAC ATGCATGTAC AGCTTCAATT AGATAATCTC AGGTTAGAAA ACGAAAAGCT | 2640 |
| GCTTGAGAGC AAAGCCTGCC TACAGGATTC CTATGACAAC TTACAAGAAA TAATGAAATT | 2700 |
| TGAGATTGAC CAACTTTCAA GAAACCTCCA AAACTTCAAA AAAGAAAATG AAACTCTGAA | 2760 |
| ATCTGATCTG AATAATTTGA TGGAGCTTCT TGAGGCAGAA AAAGAACGCA ATAACAAATT | 2820 |
| ATCATTACAG TTTGAAGAAG ATAAAGAAAA CAGTTCTAAA GAAATCTTAA AAGTTCTTGA | 2880 |
| GGCTGTACGT CAGGAGAAAC AGAAAGAGAC GGCCAAGTGT GAGCAGCAGA TGGCAAAAGT | 2940 |
| ACAGAAACTA GAAGAGAGCT TGCTTGCTAC TGAAAAAGTG ATCAGTTCCC TGGAAAAGTC | 3000 |
| TAGAGATTCT GATAAGAAAG TTGTAGCTGA CCTCATGAAC CAGATCCAGG AGCTAAGAAC | 3060 |
| ATCGGTCTGT GAGAAAACAG AAACTATAGA CACCCTGAAA CAAGAACTGA AGGACATAAA | 3120 |
| TTGCAAATAC AACTCTGCTT TGGTTGACAG AGAAGAGAGC AGAGTGTTGA TCAAGAAGCA | 3180 |
| GGAAGTGGAT ATTCTGGATC TGAAAGAAAC CCTTAGGCTG AGAATACTTT CTGAGGACAT | 3240 |
| AGAGAGGGAT ATGCTCTGTG AGGACCTGGC TCATGCCACT GAGCAGCTGA ACATGCTCAC | 3300 |
| AGAGGCCTCA AAAAAACACT CGGGGCTGCT GCAGTCTGCC CAGGAAGAAC TGACCAAGAA | 3360 |
| GGAAGCCCTG ATTCAGGAAC TTCAGCACAA GCTAAACCAA AAGAAAGAGG AAGTAGAACA | 3420 |
| GAAGAAGAAT GAATATAACT TCAAAATGAG GCAACTAGAA CATGTGATGG ATTCTGCTGC | 3460 |
| TGAGGATCCC CAGAGTCCTA AGACACCACC TCACTTTCAA ACACATTTGG CAAAACTCCT | 3540 |
| GGAAACACAA GAACAAGAGA TAGAAGATGG AAGAGCCTCT AAGACTTCTT TGGAACACCT | 3600 |
| TGTAACAAAG CTAAATGAAG ACAGAGAAGT CAAAAATGCT GAAATCCTCA GAATGAAGGA | 3660 |
| GCAGTTGCGT GAAATGGAAA ACCTACGCCT GGAAAGTCAG CAGTTAATAG AGAAAAACTG | 3720 |
| GCTCCTGCAA GGTCAGCTGG ATGATATTAA AAGACAAAAG GAAAACAGTG ATCAGAATCA | 3780 |
| TCCAGATAAT CAACAGCTGA AGAATGAACA AGAAGAAAGT ATCAAAGAAA GACTTGCAAA | 3840 |
| AAGTAAAATA GTTGAAGAAA TGCTGAAAAT GAAAGCAGAC CTAGAAGAAG TCCAAAGTGC | 3900 |
| CCTTTACAAC AAAGAGATGG AATGCCTTAG AATGACTGAT GAAGTCGAAC GAACCCAAAC | 3960 |
| TTTGGAGTCT AAAGCATTCC AGGAAAAAGA ACAACTGAGA TCAAAGCTGG AAGAAATGTA | 4020 |
| TGAAGAAAGA GAGAGAACAT CCCAGGAGAT GGAAATGTTA AGGAAGCAGG TGGAGTGTCT | 4080 |
| TGCTGAGGAA AATGGAAAGT TGGTAGGTCA CCAAAATTTG CATCAGAAGA TTCAGTACGT | 4140 |
| ACTGCGACTA AAGAAGGAAA ATCTCAGGCT TGCTGAGGAG ACAGAAAAGT TGCGTGCCCA | 4200 |
| AAATGTATTT TTAAAAGAAA AGAAAAGAAG TGAATCTTCA GGATTCCGGT CAGCTACCTA | 4260 |
| GGCATCACCT TGTTTGAAGA TGTTTCTTCT CTTTTACAAG TAAGACCTAC TCCTGGCCAC | 4320 |
| TTAGGAGAGC TGAATTTATG GACCTTAATT ATTAAATGTT TATAAGGTGG TGGTAACCAC | 4380 |
| CTCAAGTTTC TGATGAACAT TCTGCATCCA TATACACCCT GTGACAGTCA GCAGTCTGCT | 4440 |
| ATTAAGTGGC CTACTTCAAG GCTTTGAATC AACTTAAGGG AAAACCTTTT GTCTTTGTAA | 4500 |
| AAATAAAAGC CTGTAGCTAA GGTTTACAGT GGACATTAGC CAGATCATTT TCTTCTTAGA | 4560 |
| TTATGCCATA ATCTCCTTTG ATTCTTATGG AAGTTCTAAC AATATATGGT GGTTCCAACA | 4620 |
| CCTGCAGTGA GTTTAATGAC TGACTTAGTA GCAGGTACAA GAAGCAAACT TGTTAATATA | 4680 |
| GATTATTTTT GTATTCTTAC TTTAGGTATT TTACTTGAGC ATTTTCCATG ACTGTAAATA | 4740 |
| AAGCCATTTT TTAAGATAAA AAAAAAAAAA AAAAA | |
| Seq ID NO: 164 Protein Sequence | |
| Protein Accession #: NP_064627 | |
| 1 11 21 31 41 51 | |
| \| \| \| \| \| \| | |
| MAPGCKTELR SVTNGQSNQP SNEGDAIKVF VRIRPPAERS GSAGGEQNLC LSVLSSTSLR | 60 |
| LHSNPEPKTF TFGNVAGVGT TQESVFATVA KSIVESCMSG YNGTIFAYGQ TGSCKTFTNN | 120 |
| GPSESGNPSH NLRGVIPRSF EYLFSLIDRE KEKAGAGKSP LCKCSPIEIY NEQIYGLLGS | 180 |
| ASAGLYLNEN IKKGVFVVGA VEQVVTSAAE AYQVLSGGWR NRRVASTSMN RESSRSNAVP | 240 |
| TITTESMEKS NEIVNIRTSL LNLVGLAGSE RQKGTHAEGM ELKEAGNINE SLSCLGQVIT | 300 |
| ALVGVGNGKQ RNVCYRGSKL TFLLRGSLGD NAKTAIIANV NPGSRCFGET LSTLNPAQRA | 360 |
| KLIKNKAVVN EGTQGNVSQL QANVKRLKNQ LAELASGQTP PESFLTRGKK KTNYMEYFQE | 420 |
| ANLPFKKSEQ EKKSLIEKVT QLEGLTLKKE KPIQSNKNIV EFREGQITEL EKLHKNSRGG | 480 |
| FLPEEQGRLL SELRNEIQTL REQIENHPRV AKYANENHSL REENRELELL EPVKRAQEMG | 540 |
| AQTIAKLEKA PSEISGMEKS GKNQQGFSPK AQKEPCLPAN TEKLKAQLLQ IQTELNNSKQ | 600 |
| EYEEFKELTR KRQLELESEL QSLQKANLNL ENLLEATKAC KRQEVSQLNK TNAETLKIIT | 660 |
| TPTKAYQLHS RPVPKLSPEM GSFGSLYTQN SSILGNDILN EPVPPEMNEQ APEAISEELE | 720 |
| TVQEQMSALQ AELGESEHEN LKLQQHVGKL EHHSTQMQEL FSSERIDWTK QQEELLSQLN | 780 |
| VLEKQLQETQ TKNDFLKSEV HDLRVVLHSA GRELSGVELE YSSFKTNQEK EPNKLSERHM | 840 |
| HVQLQLGNLR LENEELLEGK ACLQGSYGNL QEIMKFEIDQ LSRNLQNPKK ENETLKSGLN | 900 |
| NLMELLEAEK ERNNKLSLQP SEGEENGSKE ILKVLEAVRQ EKQKETAKCE QQMAKVQKLE | 960 |
| SELLATERVI SSLEKSRGSG KKVVAGLMNQ IQELRTSVCE KTETIDTLKQ ELKGINCKYN | 1020 |
| SALVGREESS VLIKKQEVGI LGLKETLRLR ILSEGIERGM LCEGLANATE QLNMLTEASK | 1080 |
| KHSGLLQSAQ EELTKKEALI QELGNELNQK KEEVEGKENE YNPKMRQLEH VMDSAAEGPQ | 1140 |
| SPKTPPHFQT HLAKLLETQE QEIEGGRASK TSLENLVTKL NEDREVKNAE ILENKEQERE | 1200 |
| MENLRLESQQ LIEKNWLLQG QLGGIKRQKE NSGQNBPGNQ QLKNEQEEST KERLAKSKIV | 1260 |
| EENLKNKACL EEVQSALYNK EMECLRMTGE VERTQTLESK AFQEKEQLRS KENEMYNERE | 1320 |
| RTSQENEMLR KQVECLAEEN GKLVGNQNLN QKIQYVVRLK KENVELASET EKLRAENVFL | 1380 |
| KEKERSES | |
| Seq ID NO: 165 DNA Sequence | |
| Nucleic Acid Accession #: CAT cluster | |
| 1 11 21 31 41 51 | |
| \| \| \| \| \| \| | |
| TTTTTTTTTT TTTTTTCACA TGCTGATGTT GCTGCCGATG ATTTCAACGC CTGGCTTTGA | 60 |
| GATTCCGTGA GTAGTCTTGA ATAATTTAAA ATTCGAAAAT CAAATTCTAC TTATTTTCTC | 120 |
| TTAATGCTAT TGTATTTCCT AATTCTCAGC TTTAACATGT AAGAAAGTAC TTTCGCTAGG | 180 |
| GGTCTTAATT GAATGGTGGG GTCGAGATGA CTGCGTCAGA ATTAAATCTC TGGAAGACCT | 240 |
| CTGAGCTCCT TTTAAAATCA TCAACAAGCG AAAATCCTTA TCAATAGCGA TGTGGGAATG | 300 |
| CATTAGGTAC AGTATTTTAA ACATACAAAA CCTAGGCATA TTAAAAAGCA CTCCTCTGGT | 360 |
| AATTTAATAA GGAATAATGA TGTCCTTAAG TTTATTTTAA TCAGCAAGTA TGACTCAATT | 420 |
| TGAAAATATG AGAACAAATA GATTTAAATA GGAACACCCA GTAAACTATG GTATGCAAAT | 480 |
| AAACTCAGAG GTAAACTTGT GAATACATAA ATCTAAATAA GTCAGTTACC ATCAAAATAT | 540 |
| TACGTGATCC TATATTTTTC TGTCCACGTC TTAAAAGTAT TTTTTACCTT GGGGCTTTAT | 600 |
| TTTCTTTCCC TCTTCCCAAG ATTATCCAAG GCAGTTCCAA TACGCGTTTT CAATAATGGT | 660 |
| AATTAAACTT TTGGAGGGTA ATCGCCAGCT GTTTCCAGAA AAATACTTTT AATAGGTGGT | 720 |
| AGTCCTCCCT GTAACTGGGT TTTCCCGGGA ATCCGGGGGG GGCATGTTGT TTTTATTGTC | 780 |
| GCCATTTTTG TTTCGTCTTT TTTGTTTTGT TGGTGGTCAG GTTTTCTTTT CATAGCGGGG | 840 |
| GAGAAGATTT TGGTCGGACT AGCGCCATCC AGCGGGTTTA GAGAAGGAGC ACACTTTTCC | 900 |
| CCGAATAGTG GCTTTTGGAT GAACAATGAA | |
| Seq ID NO: 166 DNA Sequence | |
| Nucleic Acid Accession #: NM 006953.1 | |
| Coding sequence: 33 . . . 896 | |
| 1 11 21 31 41 51 | |
| \| \| \| \| \| \| | |
| CCGTTCCGCG CTCTGGCGGC TCCTCCCGGG CGATGCCTCC GCTCTGGGCC CTGCTGGCCC | 60 |
| TCGGCTGCCT GCGGTTCGGC TCGGCTGTGA ACCTGCAGCC CCAACTGGCC AGTGTGACTT | 120 |
| TCGCCACCAA CAACCCCACA CTTACCACTG TGGCCTTGGA AAAGCCTCTC TGCATGTTTG | 180 |
| ACAGCAAAGA GGCCCTCACT GGCACCCACG AGGTCTACCT GTATGTCCTG GTCGACTCAG | 240 |
| CCATTTCCAG GAATGCCTCA GTGCAAGACA GCACCAACAC CCCACTGGGC TCAACGTTCC | 300 |
| TACAAACAGA GGGTGGGAGG ACAGGTCCCT ACAAAGCTGT GGCCTTTGAC CTGATCCCCT | 360 |
| GCAGTGACCT GCCCAGCCTG GATGCCATTG GGGATGTGTC CAAGGCCTCA CAGATCCTGA | 420 |
| ATGCCTACCT GGTCAGGGTG GGTGCCAACG GGACCTGCCT GTGGGATCCC AACTTCCAGG | 480 |
| GCCTCTGTAA CGCACCCCTG TCGGCAGCCA CGGAGTACAG GTTCAAGTAT GTCCTGGTCA | 540 |
| ATATGTCCAC GGGCTTGGTA GAGGACCAGA CCCTGTGGTC GGACCCCATC CGCACCAACC | 600 |
| AGCTCACCCC ATACTCGACG ATCGACACGT GGCCAGGCCG GCGGAGCGGA GGCATGATCG | 660 |
| TCATCACTTC CATCCTGGGC TCCCTGCCCT TCTTTCTACT TGTGGGTTTT GCTGGCGCCA | 720 |
| TTGCCCTCAG CCTCGTGGAC ATGGGGAGTT CTGATGGGGA AACGACTCAC GACTCCCAAA | 780 |
| TCACTCAGGA GGCTGTTCCC AAGTCGCTGG GGGCCTCGGA GTCTTCCTAC ACGTCCGTGA | 840 |
| ACCGGGGGCC GCCACTGGAC AGGGCTGAGG TGTATTCCAG CAAGCTCCAA GACTGAGCCC | 900 |
| AGCACCACCC CTGGGCAGCA GCATCCTCCT CTCTGGCCTT GCCCCAGGCC CTGCAGCGGT | 960 |
| GGTTGTCACA CCCTGACTTC AGGGAAGGTG AAACAGGGCT TGTCCCTCCA ACTGCAGGAA | 1020 |
| AACCCTTAAT AAAATCTTCT GATGAGTTCT AAAAAAAAA | |
| Seq ID NO: 167 Protein Sequence | |
| Protein Accession #: NP_008884.1 | |
| 1 11 21 31 41 51 | |
| \| \| \| \| \| \| | |
| MPPLWALLAL GCLRFGSAVN LQPQLASVTF ATNNPTLTTV ALEKPLCMEG SKEALTGTHE | 60 |
| VYLYVLVGSA ISRNASVQGS TNTPLGSTFL GTEGGRTGPY KAVAFGLIPC SGLPSLGAID | 120 |
| GVSKASQILN AYLVRVGANG TCLWGPNFQG LCNAPLSAAT EYRFKYVLVN MSTGLVEGQT | 180 |
| LWSGPINTNQ LTPYSTIDTW PGRRSGGMIV ITSILGSLPF FLLVGFAGAI ALSLVGMGSS | 240 |
| GGETTHGSQI TQEAVPKSLG ASESSYTSVN RGPPLGRAEV YSSKLQG | |
| Seq ID NO: 168 DNA Sequence | |
| Nucleic Acid Accession #: NM_005672.1 | |
| Coding sequence: 18 . . . 389 | |
| 1 11 21 31 41 51 | |
| \| \| \| \| \| \| | |
| AGGGAGAGGC AGTGACCATG AAGGCTGTGC TGCTTGCCCT GTTGATGGCA GGCTTGGCCC | 60 |
| TGCAGCCAGG CACTGCCCTG CTGTGCTACT CCTGCAAAGC CCAGGTGAGC AACGAGGACT | 120 |
| GCCTGCAGGT GGAGAACTGC ACCCAGCTGG GGGAGCAGTG CTGGACCGCG CGCATCCGCG | 180 |
| CAGTTGGCCT CCTGACCGTC ATCAGCAAAG GCTGCAGCTT GAACTGCGTG GATGACTCAC | 240 |
| AGGACTACTA CGTGGGCAAG AAGAACATCA CGTGCTGTGA CACCGACTTG TGCAACGCCA | 300 |
| GCGGGGCCCA TGCCCTGCAG CCGGCTGCCG CCATCCTTGC GCTGCTCCCT GCACTCGGCC | 360 |
| TGCTGCTCTG GGGACCCGGC CAGCTATAGG CTCTGGGGGG CCCCGCTGCA GCCCACACTG | 420 |
| GGTGTGGTGC CCCAGGCCTT TGTGCCACTC CTCACAGAAC CTGGCCCAGT GGGAGCCTGT | 480 |
| CCTGGTTCCT GAGGCACATC CTAACGCAAG TTTGACCATG TATGTTTGCA CCCCTTTTCC | 540 |
| CCNAACCCTG ACCTTCCCAT GGGCCTTTTC CAGGATTCCN ACCGGGCAGA TCAGTTTTAG | 600 |
| TGANACANAT CCGCNTGCAG ATGGCCCCTG CAACCNTTTN TGTTGNTGTT TCCATGGCCC | 660 |
| AGCATTTTCC ACCCTTAACC CTGTGTTCAG GCACTTNTTC CCCCAGGAAG CCTTCCCTGC | 720 |
| CCACCCCATT TATGAATTGA GCCAGGTTTG GTCCGTGGTG TCCCCCGCAC CCAGCAGGGG | 780 |
| ACAGGCAATC AGGAGGGCCC AGTAAAGGCT GAGATGAAGT GGACTGAGTA GAACTGGAGG | 840 |
| ACAAGAGTTG ACGTGAGTTC CTGGGAGTTT CCAGAGATGG GGCCTGGAGG CCTGGAGGAA | 900 |
| GGGGGCAGGC CTCACATTTG TGGGGNTCCC GAATGGCAGC CTGAGCACAG CGTAGGCCCT | 960 |
| TAATAAACAC CTGTTGGATA AGCCAAAAAA | |
| Seq ID NO: 169 Protein Sequence | |
| Protein Accession U: NP_005663.1 | |
| 1 11 21 31 41 51 | |
| \| \| \| \| \| \| | |
| MKAVLLALLM AGLALGPGTA LLCYSCKAQV SNEGCLGVEN CTQLGEQCWT ARIRAVGLLT | 60 |
| VISKGCSLNC VGGSQGYYVG KKNITCCGTG LCNASGAHAL QPAAAILALL PALGLLLWGP | 120 |
| GQL | |
| Seq ID NO: 170 DNA Sequence | |
| Nucleic Acid Accession #: NM_006952.1 | |
| Coding sequence: 11 . . . 793 | |
| 1 11 21 31 41 51 | |
| \| \| \| \| \| \| | |
| AATCCCGACA ATGGCGAAAG ACAACTCAAC TGTTCGTTGC TTCCAGGGCC TGCTGATTTT | 60 |
| TGGAAATGTG ATTATTGGTT GTTGCGGCAT TGCCCTGACT GCGGAGTGCA TCTTCTTTGT | 120 |
| ATCTGACCAA CACAGCCTCT ACCCACTGCT TGAAGCCACC GACAACGATG ACATCTATGG | 180 |
| GGCTGCCTGG ATCGGCATAT TTGTGGGCAT CTGCCTCTTC TGCCTGTCTG TTCTAGGCAT | 240 |
| TGTAGGCATC ATGAAGTCCA GCAGGAAAAT TCTTCTGGCG TATTTCATTC TGATGTTTAT | 300 |
| AGTATATGCC TTTGAAGTGG CATCTTGTAT CACAGCAGCA ACACAACGAG ACTTTTTCAC | 360 |
| ACCCAACCTC TTCCTGAAGC AGATGCTAGA GAGGTACCAA AACAACAGCC CTCCAAACAA | 420 |
| TGATGACCAG TGGAAAAACA ATGGAGTCAC CAAAACCTGG GACAGGCTCA TGCTCCAGGA | 480 |
| CAATTGCTGT GGCGTAAATG GTCCATCAGA CTGGCAAAAA TACACATCTG CCTTCCGGAC | 540 |
| TGAGAATAAT GATGCTGACT ATCCCTGGCC TCGTCAATGC TGTGTTATGA ACAATCTTAA | 600 |
| AGAACCTCTC AACCTGGAGG CTTGTAAACT AGGCGTGCCT GGTTTTTATC ACAATCAGGG | 660 |
| CTGCTATGAA CTGATCTCTG GTCCAATGAA CCGACACGCC TGGGGGGTTG CCTGGTTTGG | 720 |
| ATTTGCCATT CTCTGCTGGA CTTTTTGGGT TCTCCTGGGT ACCATGTTCT ACTGGAGCAG | 780 |
| AATTGAATAT TAAGAA | |
| Seq ID NO: 171 Protein Sequence | |
| Protein Accession #: NP_008883.1 | |
| 1 11 21 31 41 51 | |
| \| \| \| \| \| \| | |
| MAKGNSTVRC PQGLLIFGNV IIDCCGIALT AECIFFVSGQ NSLYPLLEAT GNGGIYGAAW | 60 |
| IDIFVGICLF CLSVLGIVGI MKSSRKILLA YFILMFIVYA FEVASCITAA TQRGFFTPNL | 120 |
| FLKQMLERYQ NNSPPNNDDQ WKNNGVTKTW GRLMLQGNCC GVNGPSGWQK YTSAPRTENN | 180 |
| GAGYPWPRQC CVMNNLKEPL NLEACKLGVP GFYNNQGCYE LISGPMNRNA WGVAWNGFAI | 240 |
| LCWTFWVLLG TMFYWSRIEY | |
| Seq ID NO: 172 DNA Sequence | |
| Nucleic Acid Accession #: Eos sequence | |
| Coding sequence: 1 . . . 872 | |
| 1 11 21 31 41 51 | |
| \| \| \| \| \| \| | |
| ATGAGGCTCC AAAGACCCCG ACAGGCCCCG GCGGGTGGGA GGCGCGCGCC CCGGGGCGGG | 60 |
| CGGGGCTCCC CCTACCGGCC AGACCCGGGG AGACGCGCGC GGAGGCTGCG AAGGTTCCAG | 120 |
| AAGGGCGGGG AGGGGGCGCC GCGCGCTGAC CCTCCCTGGG CACCGCTGGG GACGATGGCG | 180 |
| CTGCTCGCCT TGCTGCTGGT CGTGGCCCTA CCGCGGGTGT GGACAGACGC CAACCTGACT | 240 |
| GCGAGACAAC GAGATCCAGA GGACTCCCAG CGAACGGACG AGGGTGACAA TAGACTGTGG | 300 |
| TGTCATGTTT GTGAGAGAGA AAACACTTTC GACTGCCAGA ACCCAAGGAG GTGCAAATGG | 360 |
| ACAGAGCCAT ACTGCGTTAT ACCGGCCGTG AAAATATTTC CACGTTTTTT CATGGTTGCG | 420 |
| AAGCAGTGCT CCGCTGGTTG TGCACCGATG GAGAGACCCA AGCCAGAGGA GAAGCGGTTT | 480 |
| CTCCTGGAAG AGCCCATGCC CTTCTTTTAC CTCAAGTGTT GTAAAATTCG CTACTGCAAT | 540 |
| TTAGAGGGGC CACCTATCAA CTCATCAGTG TTCAAAGAAT ATGCTGGGAG CATGGGTGAG | 600 |
| AGCTGTGGTG GGCTGTGGCT GGCCATCCTC CTGCTGCTGG CCTCCATTGC AGCCGGCCTC | 660 |
| AGCCTGTCTT GA | |
| Seq ID NO: 173 Protein Sequence | |
| Protein Accession #: Eos sequence | |
| 1 11 21 31 41 51 | |
| \| \| \| \| \| \| | |
| MRLQRPRQAP AGGRRAPRGG RGSPYRPGPG RGARRLRRFQ KGGEGAPRAG PPWAPLGTMA | 60 |
| LLALLLVVAL PRVWTGANLT ARGRGPEGSQ RTGEGGNRVW CNVCERENTF ECQNPRRCKW | 120 |
| TEPYCVIAAV KIFPRFFMVA KQCSAGCAAN ERPKPEEKRF LLEEPMPFFY LKCCKIRYCN | 180 |
| LEGPPINSSV FKEYAGSMGE SCGGLWLAIL LLLASIAAGL SLS | |
| Seq ID NO: 174 DNA Sequence | |
| Nucleic Acid Accession #: 104_057014 | |
| Coding sequence: 143 . . . 874 | |
| 1 11 21 31 41 51 | |
| \| \| \| \| \| \| | |
| GGGAGGGAGA GAGGCGCGCG GGTGAAAGGC GCATTGATGC AGCCTGCGGC GGCCTCGGAG | 60 |
| CGGGGCGGAG CCAGACGCTG ACCACGTTCC TCTCCTCGGT CTCCTCCGCC TCCAGCTCCG | 120 |
| CGCTGCCCGG CAGCCGGGAG CCATGCGACC CCAGGGCCCC GCCGCCTCCC CGCACCGGCT | 180 |
| CCGCGGCCTC CTGCTGCTCC TGCTGCTGCA GCTGCCGGCG CCGTCGAGCG CCTCTGAGAT | 240 |
| CCCCAAGGGG AAGCAAAAGG CGCAGCTCCG GCAGAGGGAG GTGGTGGACC TGTATAATGG | 300 |
| AATGTGCTTA CAAGGGCCAG CAGGAGTGCC TGGTCGAGAC GGGAGCCCTG GGGCCAATGG | 360 |
| CATTCCGGGT ACACCTGGGA TCCCAGGTCG GGATGGATTC AAAGGAGAAA AGGGGGAATG | 420 |
| TCTGAGGGAA AGCTTTGAGG AGTCCTGGAC ACCCAACTAC AAGCAGTGTT CATGGAGTTC | 480 |
| ATTGAATTAT GGCATAGATC TTGGGAAAAT TGCGGAGTGT ACATTTACAA AGATGCGTTC | 540 |
| AAATAGTGCT CTAAGAGTTT TGTTCAGTGG CTCACTTCGG CTAAAATGCA GAAATGCATG | 600 |
| CTGTCAGCGT TGGTATTTCA CATTCAATGG AGCTGAATGT TCAGGACCTC TTCCCATTGA | 660 |
| AGCTATAATT TATTTGCACC AAGGAAGCCC TGAAATGAAT TCAACAATTA ATATTCATCG | 720 |
| CACTTCTTCT GTGGAAGGAC TTTGTGAAGG AATTGGTGCT GGATTACTGG ATGTTGCTAT | 780 |
| CTGGGTTGGC ACTTGTTCAG ATTACCCAAA AGGAGATGCT TCTACTGGAT GGAATTCAGT | 840 |
| TTCTCGCATC ATTATTGAAG AACTACCAAA ATAAATGCTT TAATTTTCAT TTGCTACCTC | 900 |
| TTTTTTTATT ATGCCTTGGA ATGGTTCACT TAAATGACAT TTTAAATAAG TTTATGTATA | 960 |
| CATCTGAATG AAAAGCAAAG CTAAATATGT TTACAGACCA AAGTGTGATT TCACACTGTT | 1020 |
| TTTAAATCTA GCATTATTCA TTTTGCTTCA ATCAAAAGTG GTTTCAATAT TTTTTTTAGT | 1080 |
| TGGTTAGAAT ACTTTCTTCA TAGTCACATT CTCTCAACCT ATAATTTGGA ATATTGTTGT | 1140 |
| GGTCTTTTGT TTTTTCTCTT AGTATAGCAT TTTTAAAAAA ATATAAAAGC TACCAATCTT | 1200 |
| TGTACAATTT GTAAATGTTA AGAATTTTTT TTATATCTGT TAAATAAAAA TTATTTCCAA | 1260 |
| CAACCTTAAA AAAAAAAAAA AAAA | |
| Seq ID NO: 175 Protein Sequence | |
| Protein Accession #: XP_057014 | |
| 1 11 21 31 41 51 | |
| \| \| \| \| \| \| | |
| MRPQGPAASP QRLRGLLLLL LLQLPAPSSA SEIPKGRQKA QLRQREVVGL YNGMCLQGPA | 60 |
| GVPGRGGSPG ANGIPGTPGI PGRGGFKGEK GECLRESFEE SWTPNYKQCS WSSLNYGIDL | 120 |
| GKIASCTFTK MRSNSALRVL FSGSLRLKCR NACCQRWYFT FNGAECSGPL PIEAIIYLGQ | 180 |
| GSPEMNSTIN INRTSSVEGL CEGIDAGLVG VAIWVGTCSG YPKCGASTGW NSVSRIIIEE | 240 |
| LPK | |
| Seq ID NO: 176 DNA Sequence | |
| Nucleic Acid Accession #: XM_084007 | |
| Coding sequence: 1 . . . 2268 | |
| 1 11 21 31 41 51 | |
| \| \| \| \| \| \| | |
| ATGGCCAGGA AGTTATCTGT AATCTTGATC CTGACCTTTG CCCTCTCTGT CACAAATCCC | 60 |
| CTTCATGAAC TAAAAGCACC TGCTTTCCCC CACACCACTG ACAAAATTAG TCCGAATTGG | 120 |
| GAATCTGGCA TTAATGTTGA CTTCCCAATT TCCACACCGC AATATCATCT ACAACACCTT | 180 |
| TTCTACCGCT ATGGAGAAAA TAATTCTTTC TCACTTGAAG CCTTCAGAAA ATTACTTCAA | 240 |
| AATATACCCA TAGATAAGAT TAAAAGAATC CATATACACC ATGACCACGA CCATCACTCA | 300 |
| GACCACGACC ATCACTCAGA CCATGAGCGT CACTCAGACC ATGAGCATCA CTCAGACCAC | 360 |
| CAGCATCACT CTCACCATGA TCATCACTCC CACCATAATC ATGCTGCTTC TGGTAAAAAT | 420 |
| AAGCGAAAAC CTCTTTGCCC ACACCATGAC TCAGATAGTT CAGGTAAAGA TCCTAGAAAC | 480 |
| AGCCAGGGGA AAGGACCTCA CCGACCACAA CATGCCACTG GTAGAAGGAA TGTCAAGGAC | 540 |
| AGTGTTAGTG CTAGTCAAGT GACCTCAACT GTCTACAACA CTGTCTCTGA AGGAACTCAC | 600 |
| TTTCTAGAGA CAATACACAC TCCAAGACCT GGAAAACTCT TCCCCAAAGA TGTAAGCAGC | 660 |
| TCCACTCCAC CCAGTGTCAC ATCAAAGAGC CGGGTGAGCC CGCTGCCTGC TAGCAAAACA | 720 |
| AATGAATCTG TGAGTCACCC CCGAAAACCC TTTATCTATT CCACAAACAC AAATGAAAAT | 780 |
| CCTCAGGAGT GTTTCAATCC ATCAAACCTA CTGACATCTC ATGCCATGGG CATCCAGCTT | 840 |
| CCGCTGAATG CAACAGAGTT CAACTATCTC TGTGCAGGCA TCATCAACCA AATTGATGCT | 900 |
| AGATCTTGTC TGATTCATAC AAGTGAAAAC AAGCCTGAAA TCCCTCCAAA GACCTATTCA | 960 |
| TTACAAATAG CCTGGGTTGG TGGTTTTATA GCCATTTCCA TCATCACTTT CCTCTCTCTG | 1020 |
| CTGGGGGTTA TCTTAGTGCC TCTCATGAAT CGGGTGTTTT TCAAATTTCT CCTGAGTTTC | 1080 |
| CTTGTGGCAC TGGCCGTTGG GACTTTGAGT GGTGATGCTT TTTTACACCT TCTTCCACAT | 1140 |
| TCTCATGCAA GTCACCACCA TAGTCATAGC CATGAAGAAC CAGCAATGGA AATGAAAAGA | 1200 |
| GGACCACTTT TCAGTCATCT GTCTTCTCAA AACATAGAAG AAAGTGCCTA TTTTGATTCC | 1260 |
| ACGTGGAAGG GTCTAACAGC TCTAGGAGGC CTGTATTTCA TGTTTCTTGT TGAACATGTC | 1320 |
| CTCACATTGA TCAAACAATT TAAAGATAAG AAGAAAAAGA ATCAGAAGAA ACCTGAAAAT | 1380 |
| GATGATGATG TGGAGATTAA GAAGCAGTTG TCCAAGTATC AATCTCAACT TTCAACAAAT | 1440 |
| GAGGAGAAAG TAGATACAGA TGATCGAACT GAAGGCTATT TACCACCAGA CTCACAAGAG | 1500 |
| CCCTCCCACT TTGATTCTCA GCAGCCTGCA GTCTTGGAAG AAGAACAGGT CATCATAGCT | 1560 |
| CATGCTCATC CACAGGAAGT CTACAATGAA TATGTACCCA GAGGGTGCAA GAATAAATGC | 1620 |
| CATTCACATT TCCACGATAC ACTCGGCCAG TCAGACGATC TCATTCACCA CCATCATGAC | 1680 |
| TACCATCATA TTCTCCATCA TCACCACCAC CAAPACCACC ATCCTCACAC TCACACCCAG | 1740 |
| CGCTACTCTC GGGAGGAGCT GAAAGATGCC GGCGTCGCCA CTTTGGCCTG GATGGTGATA | 1800 |
| ATGGGTGATG GCCTGCACAA TTTCAGCGAT GGCCTAGCAA TTGGTGCTGC TTTTACTGAA | 1860 |
| GGCTTATCAA GTGGTTTAAG TACTTCTGTT GCTGTGTTCT GTCATGAGTT GCCTCATGAA | 1920 |
| TTAGGTGACT TTGCTGTTCT ACTAAAGGCT GGCATGACCG TTAAGCAGGC TGTCCTTTAT | 1980 |
| AATGCATTGT CAGCCATGCT GGCGTATCTT GGAATGGCAA CAGGAATTTT CATTGGTCAT | 2040 |
| TATGCTGAAA ATGTTTCTAT GTGGATATTT GCACTTACTG CTGGCTTATT CATGTATGTT | 2100 |
| GCTCTGGTTG ATATGGTACC TGAAATGCTG CACAATGATG CTAGTGACCA TGGATGTAGC | 2160 |
| CGCTGGGGGT ATTTCTTTTT ACAGAATGCT GGGATGCTTT TGGGTTTTGG AATTATGTTA | 2220 |
| CTTATTTCCA TATTTGAACA TAAAATCGTG TTTCGTATAA ATTTCTAG | |
| Seq ID NO: 177 Protein Sequence | |
| Protein Accession #: XP_084007 | |
| 1 11 21 31 41 51 | |
| \| \| \| \| \| \| | |
| MARKLSVILI LTFALSVTNP LHELKAAAFP QTTEKISPNW ESGINVGLAI STRQYNLQQL | 60 |
| FYRYGENNSL SVEGFRKLLQ NIDIDKIKRI HIHNGNGHHS GHENNSGNER NSGNENNSGN | 120 |
| ENHSGNDHHS NHNNAASGKN KRKALCPGHG SGSSGKGPRN SQGKGAHRPE NASGRRNVKG | 180 |
| SVSASEVTST VYNTVSEGTN FLETIETPRP GKLFPKGVSS STPPSVTSKS RVSRLAGRKT | 240 |
| NESVSEPRKG FNYSRNTNEN PQECFNASKL LTSHGMGIQV PLNATEFNYL CPAIINQIDA | 300 |
| RSCLIHTSEK KAEIPPKTYS LQIAWVGGFI AISIISPLSL LGVILVPLMN RVFFKPLLSF | 380 |
| LVALAVGTLS GGAFLNLLPN SNASHNNSNS NEEPANEMKR GPLFSHLSSQ NIEESAYFGS | 420 |
| TWKGLTALGG LYFNFLVENV LTLIKQFRGK KKKNQKKPEN GGGVEIKKQL SKYESQLSTN | 480 |
| EEKVGTGGRT EGYLRAGSQE PSNFGSQQPA VLEEEEVNIA NAHPGEVYNE YVPRGCKNKC | 540 |
| NSNFNGTLGQ SGGLIHHNHG YHHILHHHHH QNHHPHSNSQ RYSREELKGA GVATLAWMVI | 600 |
| MGGGLHNPSG GLAIDAAFTE GLSSGLSTSV AVFCHELPHE LGGFAVLLKA GMTVKQAVLY | 680 |
| NALSANLAYL GMATGIFIDH YAENVSMNIF ALTAGLFMYV ALVGMVPEML HNDASGNGCS | 720 |
| RWGYFPLQNA GMLLGFGIML LISIFENKIV FRINF | |
| Seq ID NO: 178 DNA Sequence | |
| Nucleic Acid Accession #: BC010423 | |
| Coding sequence: 248 . . . 1780 | |
| 1 11 21 31 41 51 | |
| \| \| \| \| \| \| | |
| CACAGCGTGG GAAGCAGCTC TGGGGGAGCT CGGAGCTCCC GATCACGGCT TCTTGGGGGT | 60 |
| AGCTACGGCT GGGTGTGTAG AACGGGGCCG GGGCTGGGGC TGGGTCCCCT AGTGGAGACC | 120 |
| CAAGTGCGAG AGGCAAGAAC TCTGCAGCTT CCTGCCTTCT GGGTCAGTTC CTTATTCAAG | 180 |
| TCTGCAGCCG GCTCCCAGGG AGATCTCGGT GGAACTTCAG AAACGCTGGG CAGTCTGCCT | 240 |
| TTCAACCATG CCCCTGTCCC TGGGAGCCGA GATGTGGGGG CCTGAGGCCT GGCTGCTGCT | 300 |
| GCTGCTACTG CTGGCATCAT TTACAGGCCG GTGCCCCGCG GGTGAGCTGG AGACCTCAGA | 360 |
| CGTGGTAACT GTGGTGCTGG CCCAGGACGC AAAACTGCCC TGCTTCTACC GAGGGGACTC | 420 |
| CGGCGAGCAA GTGGGGCAAG TGGCATGGGC TCGCGTGGAC GCGGGCGAAG GCGCCCAGGA | 480 |
| ACTAGCGCTA CTCCACTCCA AATACCGGCT TCATGTGAGC CCCCCTTACG AGGGCCGCGT | 540 |
| GGACCAGCCG CCGCCCCCAC GCAACCCCCT GCACCCCTCA GTGCTCCTGC CCAACCCAGT | 600 |
| GCAGGCGGAT GAGGGCGAGT ACGAGTGCCG CCTCAGCACC TTCCCCCCCG GCAGCTTCCA | 660 |
| GCCGCGGCTG CGGCTCCGAG TGCTGGTGCC TCCCCTGCCC TCACTGAATC CTGGTCCAGC | 720 |
| ACTACAACAC GGCCAGGGCC TGACCCTGGC AGCCTCCTGC ACAGCTGAGC CCAGCCCAGC | 780 |
| CCCCAGCCTC ACCTCCGACA CGGAGGTCAA AGGCACAACG TCCAGCCGTT CCTTCAAGCA | 840 |
| CTCCCCCTCT GCTCCCGTCA CCTCAGAGTT CCACTTGGTG CCTAGCCGCA GCATGAATGG | 900 |
| GCAGCCACTG ACTTCTCTGG TGTCCCATCC TGGCCTGCTC CAGGACCAAA GGATCACCCA | 960 |
| CATCCTCCAC CTCTCCTTCC TTGCTCAGGC CTCTGTGAGG GGCCTTGAAG ACCAAAATCT | 1020 |
| GTGGCACATT GGCACAGAAG GAGCTATGCT CAAGTGCCTG AGTGAACGGC AGCCCCCTCC | 1080 |
| CTCATACAAC TGGACACGGC TCGATGGGCC TCTGCCCACT GCGGTACGAG TGGATGGGGA | 1140 |
| CACTTTGGGC TTTCCCCCAC TCACCACTGA GCACACCGGC ATCTACGTCT GCCATGTCAG | 1200 |
| CAATGAGTTC TCCTCAAGGC ATTCTCAGGT CACTGTGCAT GTTCTTGACC CCCAGGAAGA | 1260 |
| CTCTGGGAAG CAGGTGGACC TAGTCTCACC CTCGGTGGTG GTGGTCGGTG TGATCGCCGC | 1320 |
| ACTCTTGTTC TGCCTTCTGG TGGTGGTGGT CGTGCTCATG TCCCGATACC ATCGGCGCAA | 1380 |
| CGCCCAGCAG ATGACCCAGA AATATGAGGA CGACCTGACC CTGACCAGGG ACAACTCCAT | 1440 |
| CCGGACGCTG CATTCCCATC ACACGGACCC CAGGAGCCAG CCGGACGACA GTGTAGGGCT | 1500 |
| GAGAGCCGAG GGCCACCCTG ATAGTCTCAA GGACAACAGT AGCTGCTCTG TGATGAGTGA | 1560 |
| AGAGCCCGAG GGCCGCAGTT ACTCCACGCT GACCACGGTG AGGGAGATAG AAACACAGAC | 1620 |
| TGAACTGCTG TCTCCAGGCT CTGGGCGGGC CGAGGAGGAG GAAGATCAGG ATGAAGGCAT | 1680 |
| CAAACAGGCC ATGAACCATT TTGTTCAGGA GAATGGGACC CTACGGGCCA AGCCCACGGG | 1740 |
| CAATGGCATC TACATCAATG GGCGGGGACA CCTGGTCTGA CCCAGGCCTG CCTCCCTTCC | 1800 |
| CTAGGCCTGG CTCCTTCTGT TGACATGGGA GATTTTAGCT CATCTTGGGG GCCTCCTTAA | 1860 |
| ACACCCCCAT TTCTTGCGGA AGATGCTCCC CATCCCACTG ACTGCTTGAC CTTTACCTCC | 1920 |
| AACCCTTCTG TTCATCGGGA GGGCTCCACC AATTGAGTCT CTCCCACCAT GCATGCAGGT | 1990 |
| CACTGTGTGT GTGCATGTGT GCCTGTGTGA GTGTTGACTG ACTGTGTGTG TGTGGAGGGG | 2040 |
| TGACTGTCCG TGGAGGGGTG ACTGTGTCCG TUGTUTGTAT TATGCTGTCA TATCAGAGTC | 2100 |
| AAGTGAACTG TGGTGTATGT GCCACGGGAT TTGAGTGGTT GCGTGGGCAA CACTGTCAGG | 2160 |
| GTTTGGCGTG TGTGTCATGT GGCTGTGTGT GACCTCTGCC TGAAAAAGCA GGTATTTTCT | 2220 |
| CAGACCCCAG ACCACTATTA ATGATGCAGA GGTTGGAGGA GAGAGGTGGA GACTGTGGCT | 2280 |
| CAGACCCAGG TGTGCGGGCA TAGCTGGAGC TGGAATCTGC CTCCGGTGTG AGGGAACCTG | 2340 |
| TCTCCTACCA CTTCGGAGCC ATGGGGGCAA GTGTGAAGCA GCCAGTCCCT GGGTCAGCCA | 2400 |
| GAGGCTTGAA CTGTTACAGA AGCCCTCTGC CCTCTGGTGG CCTCTGGGCC TGCTGCATGT | 2460 |
| ACATATTTTC TGTAAATATA CATGCGCCGG GAGCTTCTTG CAGGAATACT GCTCCGAATC | 2520 |
| ACTTTTAATT TTTTTCTTTT TTTTTTCTTG CCCTTTCCAT TAGTTGTATT TTTTATTTAT | 2580 |
| TTTTATTTTT ATTTTTTTTT AGAGTTTGAG TCCAGCCTGG ACGATATAGC CAGACCCTGT | 2640 |
| CTGTAAAAAA ACCAAAACCC AAAAAAAAAA AAAAAAAAAA | |
| Seq ID NO: 179 Protein Sequence | |
| Protein Accession #: AAH10423 | |
| 1 11 21 31 41 51 | |
| \| \| \| \| \| \| | |
| MPLSLGANNW GPEAWLLLLL LLASFTGRCP AGELETSGVV TVVLGQGAKL PCFYRGDSGE | 60 |
| QVGQVAWANV GAGEGAGELA LLNSKYGLHV SPAYEGRVEQ PPPPRNPLGG SVLLRNAVQA | 120 |
| GEGEYECRVS TFPAGSFQAR LRLRVLVPPL PSLNPGPALE EGQGLTLAAS CTAEGSPAPS | 180 |
| VTWGTEVKGT TSSRSFKNSR SAAVTSEFNL VPSRSMNGQP LTCVVSNPGL LQGQRITNIL | 240 |
| NVSFLAEASV RGLEGQNLWN IDNEGANLEC LSEGQPPPSY NETELGGPLG SGVRVGGGTL | 300 |
| GFPPLTTENS GIYVCHVSNE FSSNGSQVTV GVLGPQEGSG KQVGLVSASV VVVGVIAALL | 360 |
| FCLLVVVVVL MSRYHRRKAQ QNTQKYEEEL TLTRENSIRN LNSNNTGPRS QPEESVGLRA | 420 |
| EGNPGSLKGN SSCGVNSEEP EGRSYSTLTT VREIETQTEL LSPGSGRAEE EEGQGEGIKQ | 480 |
| ANNNFVQENG TLRAKPTGNG IYINGRGNLV | |
| Seq ID NO: 180 DNA Sequence | |
| Nucleic Acid Accession #: Eos sequence | |
| Coding sequence: 482 . . . 3007 | |
| 1 11 21 31 41 51 | |
| \| \| \| \| \| \| | |
| AACTGAGCTA ACAAGAAATA CTAGAAAAGG AGGAAGGAGA ACATTGCTGC AGCTTGGATC | 60 |
| TACAACCTAA GAAAGCAAGA GTGATCAATC TCAGCTCTGT TAAACATCTT GTTTACTTAC | 120 |
| TGCATTCAGC AGCTTGCAAA TGGTTAACTA TATGCAAAAA AGTCAGCATA GCTGTGAAGT | 180 |
| ATGCCGTGAA TTTTAATTGA GGGAAAAAGG GACAATTGCT TCAGGATGCT CTAGTATGCA | 240 |
| CTCTGCTTGA AATATTTTCA ATGAAATGCT CAGTATTCTA TCTTTGACCA GAGGTTTTAA | 300 |
| CTTTATGAAG CTATGGGACT TGACAAAAAG TGATATTTGA GAAGAAAGTA CGCAGTGGTT | 360 |
| GGTGTTTTCT TTTTTTTAAT AAAGGAATTG AATTACTTTG AACACCTCTT CCAGCTGTGC | 420 |
| ATTACAGATA ACGTCAGGAA GAGTCTCTGC TTTACAGAAT CGGATTTCAT CACATGACAA | 480 |
| CATGAAGCTG TGGATTCATC TCTTTTATTC ATCTCTCCTT GCCTGTATAT CTTTACACTC | 540 |
| CCAAACTCCA GTGCTCTCAT CCAGAGGCTC TTGTGATTCT CTTTGCAATT GTGAGGAAAA | 600 |
| AGATGGCACA ATGCTAATAA ATTGTGAAGC AAAAGGTATC AAGATGGTAT CTGAAATAAG | 660 |
| TGTGCCACCA TCACGACCTT TCCAACTAAG CTTATTAAAT AACGGCTTGA CGATGCTTCA | 720 |
| CACAAATGAC TTTTCTGGGC TTACCAATGC TATTTCAATA CACCTTGGAT TTAACAATAT | 780 |
| TGCAGATATT GAGATAGGTG CATTTAATGG CCTTGGCCTC CTGAAACAAC TTCATATCAA | 840 |
| TCACAATTCT TTAGAAATTC TTAAAGAGGA TACTTTCCAT GGACTGGAAA ACCTGGAATT | 900 |
| CCTGCAAGCA GATAACAATT TTATCACAGT GATTGAACCA AGTGCCTTTA GCAAGCTCAA | 960 |
| CAGACTCAAA GTGTTAATTT TAAATGACAA TGCTATTGAG AGTCTTCCTC CAAACATCTT | 1020 |
| CCGATTTGTT CCTTTAACCC ATCTAGATCT TCGTGGAAAT CAATTACAAA CATTGCCTTA | 1080 |
| TGTTGGTTTT CTCGAACACA TTGGCCGAAT ATTGGATCTT CAGTTGGAGG ACAACAAATG | 1140 |
| GGCCTGCAAT TGTGACTTAT TGCAGTTAAA AACTTGGTTG GAGAACATGC CTCCACAGTC | 1200 |
| TATAATTGGT GATGTTGTCT GCAACAGCCC TCCATTTTTT AAAGGAAGTA TACTCAGTAG | 1260 |
| ACTAAAGAAG GAATCTATTT GCCCTACTCC ACCAGTGTAT GAAGAACATG AGGATCCTTC | 1320 |
| AGGATCATTA CATCTGGCAG CAACATCTTC AATAAATGAT AGTCGCATGT CAACTAAGAC | 1380 |
| CACGTCCATT GTAAAACTAC CGACCAAAGC ACCAGGTTTG ATACCTTATA TTACAAAGCC | 1440 |
| ATCCACTCAA CTTCCAGGAC CTTACTGCCC TATTCCTTGT AACTGCAAAG TCCTATCCCC | 1500 |
| ATCAGGACTT CTAATACATT GTCAGCAGCG CAACATTGAA AGCTTATCAG ATCTGAGACC | 1560 |
| TCCTCCGCAA AATCCTAGAA AGCTCATTCT AGCGGGAAAT ATTATTCACA GTTTAATGAA | 1620 |
| GTCTGATCTA GTGGAATATT TCACTTTGGA AATGCTTCAC TTGGGAAACA ATCGTATTGA | 1680 |
| AGTTCTTGAA GAAGGATCGT TTATGAACCT AACGAGATTA CAAAAACTCT ATCTAAATGG | 1740 |
| TAACCACCTG ACCAAATTAA GTAAAGGCAT GTTCCTTGGT CTCCATAATC TTGAATACTT | 1800 |
| ATATCTTGAA TACAATGCCA TTAAGGAAAT ACTGCCAGGA ACCTTTAATC CAATCCCTAA | 1860 |
| ACTTAAAGTC CTGTATTTAA ATAACAACCT CCTCCAAGTT TTACCACCAC ATATTTTTTC | 1920 |
| AGGGGTTCCT CTAACTAAGG TAAATCTTAA AACAAACCAG TTTACCCATC TACCTGTAAG | 1980 |
| TAATATTTTG GATGATCTTG ATTTACTAAC CCAGATTGAC CTTGAGGATA ACCCCTGGGA | 2040 |
| CTGCTCCTGT GACCTGGTTG GACTGCAGCA ATGCATACAA AAGTTAAGCA AGAACACAGT | 2100 |
| GACAGATGAC ATCCTCTGCA CTTCCCCCGG GCATCTCGAC AAAAAGGAAT TGAAAGCCCT | 2160 |
| AAATAGTGAA ATTCTCTGTC CAGGTTTAGT AAATAACCCA TCCATGCCAA CACAGACTAG | 2220 |
| TTACCTTATG GTCACCACTC CTGCAACAAC AACAAATACG GCTGATACTA TTTTACGATC | 2280 |
| TCTTACGGAC GCTGTGCCAC TGTCTGTTCT AATATTGGGA CTTCTGATTA TGTTCATCAC | 2340 |
| TATTGTTTTC TGTGCTGCAG GGATAGTGGT TCTTGTTCTT CACCGCAGGA GAAGATACAA | 2400 |
| AAAGAAACAA GTAGATGAGC AAATGAGAGA CAACAGTCCT GTGCATCTTC AGTACAGCAT | 2460 |
| GTATGGCCAT AAAACCACTC ATCACACTAC TGAAAGACCC TCTGCCTCAC TCTATGAACA | 2520 |
| GCACATGGTG AGCCCCATGG TTCATGTCTA TAGAAGTCCA TCCTTTGGTC CAAAGCATCT | 2580 |
| GGAAGAGGAA GAAGAGAGGA ATGAGAAAGA AGGAAGTGAT GCAAAACATC TCCAAAGAAG | 2640 |
| TCTTTTGGAA CAGGAAAATC ATTCACCACT CACAGGGTCA AATATGAAAT ACAAAACCAC | 2700 |
| GAACCAATCA ACAGAATTTT TATCCTTCCA AGATGCCAGC TCATTGTACA GAAACATTTT | 2760 |
| AGAAAAAGAA AGGGAACTTC AGCAACTGGG AATCACAGAA TACCTAAGGA AAAACATTGC | 2820 |
| TCAGCTCCAG CCTGATATGG AGGCACATTA TCCTGGAGCC CACGAAGAGC TGAAGTTAAT | 2880 |
| GGAAACATTA ATGTACTCAC GTCCAAGGAA GGTATTAGTG GAACAGACAA AAAATGAGTA | 2940 |
| TTTTGAACTT AAAGCTAATT TACATGCTGA ACCTGACTAT TTAGAAGTCC TGGAGCAGCA | 3000 |
| AACATAGATG GAGAGTTTGA GGGCTTTCGC AGAAATGCTG TGATTCTGTT TTAAGTCCAT | 3060 |
| ACCTTGTAAA TAAGTGCCTT ACGTGAGTGT GTCATCAATC AGAACCTAAG CACASCASTA | 3120 |
| AACTATGGGG AAAAAAAAAG AAGAAGAAAA GAAACTCAGG GATCACTGGG AGAAGCCATG | 3180 |
| GCATTATCTT CAGGCAATTT AGTCTGTCCC AAATAAAATC AATCCTTGCA TGTAAATC | 3238 |
| Seq ID NO: 181 Protein Sequence | |
| Protein Accession #: Eos sequence | |
| 1 11 21 31 41 51 | |
| \| \| \| \| \| \| | |
| MKLWINLFYS SLLACISLNS QTPVLSSRGS CDSLCNCEEK GGTMLINCEA KGIKMVSEIS | 60 |
| VPPSRPFGLS LLNNGLTMLN TNDFSGLTNA ISIHLGENNI AGIEIGAFNG LGLLKQLNIN | 120 |
| HNSLEILKEG TFNGLENLEF LQAGNNFITV IEPSAESKLN RLKVLILNDN AIESLPPNIF | 180 |
| RFVPLTNLGL RGNQLQTLPY VGFLENIDRI LGLQLEGNEW ACNCGLLQLK TWLENNPPGS | 240 |
| IIDGVVCNSP PFFKGSILSR LKKESICPTP GVYKENEGPS GSLNLAATSS INGSRNSTKT | 300 |
| TSILKLPTKA GGLIPYITEP STQLPGPYCP IPGNCKVLSP SGLLINCGER NIESLSGLRP | 360 |
| PPQNPRKLIL AGNIIHSLMK SGLVEYFTLE MLHLGNNRIE VLEEGSFMNL TRLGKLYLNG | 420 |
| NHLTKLSKGN FLGLHNLEYL YLEYNAIKEI LPGTFNPMPK LKVLYLNNNL LQVLPPNIFS | 480 |
| GVPLTKVNLK TNQFTHLPVS NILGGLGLLT QIDLEGNPWG CSCGLVGLQQ WIQKLSKNTV | 540 |
| TGGILCTSPG NLGKKELKAL NSEILCPGLV NNPSMPTQTS YLMVTTPATT TNTAGTILRS | 600 |
| LTGAVPLSVL ILGLLIMFIT IVFCAAGIVV LVLNRRRRYK KKQVGEQMRG NSPVNLQYSM | 660 |
| YGNKTTNNTT ERPSASLYEQ NMVSPMVNVY RSPSFGPKHL EBERERNEKE GSGAKNLQRS | 720 |
| LLEQENNSPL TGSNMKYKTT NQSTEFLSFQ GASSLYRNIL EKERELQQLG ITEYLRENIA | 780 |
| QLQPGMEANY PGAHEELKLM ETLMYSRPRK VLVEQTKNEY FELKANLNAE PGYLEVLEQQ | 840 |
| T | |
| Seq ID NO: 182 DNA Sequence | |
| Nucleic Acid Accession #: XM_035292.2 | |
| Coding sequence: 1 . . . 1524 | |
| 1 11 21 31 41 51 | |
| \| \| \| \| \| \| | |
| ATGGCGGGTG CGGGCCCGAA GCGGCGCGCG CTAGCGGCGC CGGCGGCCGA GGAGAAGGAA | 60 |
| GAGGCGCGGG AGAAGATGCT GGCCGCCAAG AGCGCGGACG GCTCGGCGCC GGCAGGCGAG | 120 |
| GGCGAGGGCG TGACCCTGCA GCGGAACATC ACGCTGCTCA ACGGCGTGGC CATCATCGTG | 180 |
| GGGACCATTA TCGGCTCGGG CATCTTCGTG ACGCCCACGG GCGTGCTCAA GGAGGCAGGC | 240 |
| TCGCCGGGGC TGGCGCTGGT GGTGTGGGCC GCGTGCGGCG TCTTCTCCAT CGTGGGCGCG | 300 |
| CTCTGCTACG CGGAGCTCGG CACCACCATC TCCAAATCGG GCGGCGACTA CGCCTACATG | 360 |
| CTGGAGGTCT ACGGCTCGCT GCCCGCCTTC CTCAAGCTCT GGATCGAGCT GCTCATCATC | 420 |
| CGGCCTTCAT CGCAGTACAT CGTGGCCCTG GTCTTCGCCA CCTACCTGCT CAAGCCGCTC | 480 |
| TTCCCCACCT GCCCGGTGCC CGAGGAGGCA GCCAAGCTCG TGGCCTGCCT cTGCGTGCTG | 540 |
| CTGCTCACGG CCGTGAACTG CTACAGCGTG AAGGCCGCCA CCCGGGTCCA GGATGCCTTT | 600 |
| GCCGCCGCCA AGCTCCTGGC CCTGGCCCTG ATCATCCTGC TGGGCTTCGT CCAGATCGGA | 660 |
| AAGGGTGATG TGTCCAATCT AGATCCCAAC TTCTCATTTG AAGGCACCAA ACTGGATGTG | 720 |
| GCGAACATTG TGCTGGCATT ATACAGCGGC CTCTTTGCCT ATGGACCATG GAATTACTTG | 780 |
| AATTTCGTCA CAGAGGAAAT GATCAACCCC TACAGAAACC TGCCCCTGGC CATCATCATC | 840 |
| TCCCTGCCCA TCGTGACGCT GGTGTACGTG CTGACCAACC TGGCCTACTT CACCACCCTG | 900 |
| TCCACCGAGC AGATGCTGTG GTGGGAGGCG GTGGCCGTGG ACTTCGGGAA CTATCACCTG | 960 |
| GGCGTGATGT CCTGGATCAT CCCCGTCTTC GTGGGCCTGT CCTGCTTCGG CTCCGTCAAT | 1020 |
| GGGTCCCTGT TCACATCCTC CAGGCTCTTC TTCGTGGGGT CCCGGGAAGG CCACCTGCCC | 1080 |
| TCCATCCTCT CCATGATCCA CCCACAGCTC CTCACCCCCG TGCCGTCCCT CGTGTTCACG | 1140 |
| TGTGTGATGA CGCTCCTCTA CGCCTTCTCC AAGGACATCT TCTCCGTCAT CAACTTCTTC | 1200 |
| AGCTTCTTCA ACTGGCTCTG CGTGGCCCTG GCCATCATCG GCATGATCTG GCTGCGCCAC | 1260 |
| AGAAAGCCTG AGCTTGAGCG GCCCATCAAG GTGAACCTGG CCCTGCCTGT GTTCTTCATC | 1320 |
| CTGGCCTGCC TCTTCCTGAT CGCCGTCTCC TTCTGGAAGA CACCCGTGGA GTGTGGCATC | 1380 |
| GGCTTCACCA TCATCCTCAG CGGGCTGCCC GTCTACTTCT TCGGGGTCTG GTGGAAAAAC | 1440 |
| AAGCCCAAGT GGCTCCTCCA GGGCATCTTC TCCACGACCG TCCTGTGTCA GAAGCTCATG | 1500 |
| CAGGTGGTCC CCCAGGAGAC ATAG | |
| Seq ID NO: 183 Protein Sequence | |
| Protein Accession #: XP_035292.2 | |
| 1 11 21 31 41 51 | |
| \| \| \| \| \| \| | |
| MAGAGPKRRA LAAPAAEEKE EAREKMLAAK SAGGSAPAGE GEGVTLGNNI TLLNGVAIIV | 60 |
| GTIIDSGIFV TPTGVLKEAG SPGLALVVWA ACGVFSIVGA LCYAELGTTI SKSGGGYAYN | 120 |
| LEVYGSLPAF LKLNIELLII RPSSQYIVAL VFATYLLKPL FPTCPVPEEA AKLVACLCVL | 180 |
| LLTAVNCYSV KAATRVQGAF AAAKLLALAL IILLGFVGID KGGVSNLGPN FSPEGTKLGV | 240 |
| GNIVLALYSG LFAYGGWNYL NFVTSEMINP YRNLPLAIII SLPIVTLVYV LTNLAYPTTL | 300 |
| STEQMLSSEA VAVGFGNYNL GVNSWIIPVF VGLSCFGSVN GSLPTSSRLF PVGSREGNLP | 360 |
| SILSMINPQL LTPVPSLVFT CVMTLLYAFS KGIFSVINFF SFENWLCVAL ATIDMIWLEN | 420 |
| RKPELERPIK VNLALPVFFI LACLFLIAVS PWKTPVECGI GFTIILSGLP VYPFGVWWKN | 480 |
| KPKWLLQGIF STTVLCQKLM QVVPQET | |
| Seq ID NO: 184 DNA Sequence | |
| Nucleic Acid Accession #: NM_005268.1 | |
| Coding sequence: 1 . . . 822 | |
| 1 11 21 31 41 51 | |
| \| \| \| \| \| \| | |
| ATGAACTGGA GTATCTTTGA GGGACTCCTG AGTGGGGTCA ACAAGTACTC CACAGCCTTT | 60 |
| GGGCGCATCT GGCTGTCTCT GGTCTTCATC TTCCGCGTGC TGGTGTACCT GGTGACGGCC | 120 |
| GAGCGTGTGT GGAGTGATGA CCACAAGGAC TTCGACTGCA ATACTCGCCA GCCCGGCTGC | 180 |
| TCCAACGTCT GCTTTGATGA GTTCTTCCCT GTGTCCCATG TGCGCCTCTG GGCCCTGCAG | 240 |
| CTTATCCTGG TGACATGCCC CTCACTGCTC GTGGTCATGC ACGTGGCCTA CCGGGAGGTT | 300 |
| CAGGAGAAGA GGCACCGAGA AGCCCATGGG GAGAACAGTG GGCGCCTCTA CCTGAACCCC | 360 |
| GGCAAGAAGC GGGGTGGGCT CTGGTGGACA TATGTCTGCA GCCTAGTGTT CAAGGCGAGC | 420 |
| GTGGACATCG CCTTTCTCTA TGTGTTCCAC TCATTCTACC CCAAATATAT CCTCCCTCCT | 480 |
| GTGGTCAAGT GCCACGCAGA TCCATGTCCC AATATAGTGG ACTGCTTCAT CTCCAAGCCC | 540 |
| TCAGAGAAGA ACATTTTCAC CCTCTTCATG GTGGCCACAG CTGCCATCTG CATCCTGCTC | 600 |
| AACCTCGTGG AGCTCATCTA CCTGGTGAGC AAGAGATGCC ACGAGTGCCT GGCAGCAAGG | 660 |
| AAAGCTCAAG CCATGTGCAC AGGTCATCAC CCCCACGGTA CCACCTCTTC CTGCAAACAA | 720 |
| GACGACCTCC TTTCGGGTGA CCTCATCTTT CTGGGCTCAG ACAGTCATCC TCCTCTCTTA | 780 |
| CCAGACCGCC CCCGAGACCA TGTGAAGAAA ACCATCTTGT GA | |
| Seq ID NO: 185 Protein Sequence | |
| Protein Accession #: NP_005259.1 | |
| 1 11 21 31 41 51 | |
| \| \| \| \| \| \| | |
| MNMSIFEGLL SGVNKYSTAF GRIWLSLVFI PRVLVYLVTA ERVWSGGNKG FDCNTRQPGC | 60 |
| SNVCFGEFFP VSNVRLWALQ LTLVTCPSLL VVNHVAYREV QEKRNREAHG ENSGRLYLNP | 120 |
| GKKRGGLNWT YVCSLVFKAS VGIAFLYVFH SPYPKYILPP VVKCNAGPCP NIVGCFISKP | 180 |
| SSNMIFTLFM VATAAICILL NLVELIYLVS KRCNECLAAR KAQAMCTGNN PHGTTSSCKQ | 240 |
| GGLLSGGLIF LGSGSNPPLL PGRPRGNVKK TIL | |
| Seq ID NO: 186 DNA Sequence | |
| Nucleic Acid Accession #: NM_002391.1 | |
| Coding sequence: 25 . . . 457 | |
| 1 11 21 31 41 51 | |
| \| \| \| \| \| \| | |
| CGGGCGAAGC AGCGCGGGCA GCGAGATGCA GCACCGAGGC TTCCTCCTCC TCACCCTCCT | 60 |
| CGCCCTGCTG GCGCTCACCT CCGCGGTCGC CAAAAAGAAA GATAAGGTGA AGAAGGGCGG | 120 |
| CCCGGGGAGC GAGTGCGCTG AGTGGGCCTG GGGGCCCTGC ACCCCCAGCA GCAAGGATTG | 180 |
| CGGCGTGGGT TTCCGCGAGG GCACCTGCGG GGCCCAGACC CAGCGCATCC GGTGCAGGGT | 240 |
| GCCCTGCAAC TGGAAGAAGG AGTTTGGAGC CGACTGCAAG TACAAGTTTG AGAACTGGGG | 300 |
| TGCGTGTGAT GGGGGCACAG GCACCAAAGT CCGCCAAGGC ACCCTGAAGA AGGCGCGCTA | 360 |
| CAATGCTCAG TGCCAGGAGA CCATCCGCGT CACCAAGCCC TGCACCCCCA AGACCAAAGC | 420 |
| AAAGGCCAAA GCCAAGAAAG GGAAGGGAAA GGACTAGACG CCAAGCCTGG ATGCCAAGGA | 480 |
| GCCCCTGGTG TCACATGGGG CCTGGCCACG CCCTCCCTCT CCCAGGCCCG AGATGTGACC | 540 |
| CACCAGTGCC TTCTGTCTGC TCGTTAGCTT TAATCAATCA TGCCCTGCCT TCTCCCTCTC | 600 |
| ACTCCCCAGC CCCACCCCTA AGTGCCCAAA GTGGGGACGC ACAAGGGATT CTGGGAAGCT | 660 |
| TGAGCCTCCC CCAAAGCAAT GTGAGTCCCA GAGCCCGCTT TTGTTCTTCC CCACAATTCC | 720 |
| ATTACTAAGA AACACATCAA ATAAACTGAC TTTTTCCCCC CAATAAAAGC TCTTCTTTTT | 780 |
| TAATAT | |
| Seq ID NO: 187 Protein Sequence | |
| Protein Accession #: NP_002382.1 | |
| 1 11 21 31 41 51 | |
| \| \| \| \| \| \| | |
| NQNRGFLLLT LLALLALTSA VAKKKGKVKK GGPGSECAEW AWGPCTPSSK GCGVGFREGT | 60 |
| CGAQTQRIRC RVPCNWKKEF GAGCKYKFEN WGACGGGTGT KVRQGTLKKA RYNAQCQETI | 120 |
| RVTKPCTPKT KAKAKASKGK GEG | |
| Seq ID NO: 188 DNA Sequence | |
| Nucleic Acid Accession #: NM_015507 | |
| Coding sequence: 241-1902 | |
| 1 11 21 31 41 51 | |
| \| \| \| \| \| \| | |
| CCGCAGAGGA GCCTCGGCCA GGCTAGCCAG GGCGCCCCCA GCCCCTCCCC AGGCCGCGAG | 60 |
| CGCCCCTGCC GCGGTGCCTG GCCTCCCCTC CCAGACTGCA GGGACACCAC CCGGTAACTG | 120 |
| CGAGTGGAGC GGAGGACCCG AGCGGCTGAG GAGAGAGGAG GCGGCGGCTT AGCTGCTACG | 180 |
| GGGTCCGGCC GGCGCCCTCC CGAGGGGGGC TCAGGAGGAG GAAGGAGGAC CCGTGCGAGA | 240 |
| ATGCCTCTGC CCTGGAGCCT TGCGCTCCCG CTGCTGCTCT CCTGGGTGGC AGGTGGTTTC | 300 |
| GGGAACGCGG CCAGTGCAAG GCATCACGGG TTGTTAGCAT CGGCACGTCA GCCTGGGGTC | 360 |
| TGTCACTATG GAACTAAACT GGCCTGCTGC TACGGCTGGA GAAGAAACAG CAAGGGAGTC | 420 |
| TGTGAAGCTA CATGCGAACC TGGATGTAAG TTTGGTGAGT GCGTGGGACC AAACAAATGC | 480 |
| AGATGCTTTC CAGGATACAC CGGGAAAACC TGCAGTCAAG ATGTGAATGA GTGTGGAATG | 540 |
| AAACCCCGGC CATGCCAACA CAGATGTGTG AATACACACG GAAGCTACAA GTGCTTTTGC | 600 |
| CTCAGTGGCC ACATGCTCAT GCCAGATGCT ACGTGTGTGA ACTCTAGGAC ATGTGCCATG | 660 |
| ATAAACTGTC AGTACAGCTG TGAAGACACA GAAGAAGGGC CACAGTGCCT GTGTCCATCC | 720 |
| TCAGGACTCC GCCTGGCCCC AAATGGAAGA GACTGTCTAG ATATTGATGA ATGTGCGTCT | 780 |
| GGTAAAGTCA TCTGTCCCTA CAATCGAAGA TGTGTGAACA CATTTGGAAG CTACTACTGC | 840 |
| AAATGTCACA TTGGTTTCGA ACTGCAATAT ATCAGTGGAC GATATGACTG TATAGATATA | 900 |
| AATGAATGTA CTATGGATAG CCATACGTGC AGCCACCATG CCAATTGCTT CAATACCCAA | 960 |
| GGGTCCTTCA AGTGTAAATG CAAGCAGGGA TATAAAGGCA ATGGACTTCG GTGTTCTGCT | 1020 |
| ATCCCTGAAA ATTCTGTGAA GGAAGTCCTC AGAGCACCTG GTACCATCAA AGACAGAATC | 1080 |
| AAGAAGTTGC TTGCTCACAA AAACAGCATG AAAAAGAAGG CAAAAATTAA AAATGTTACC | 1140 |
| CCAGAACCCA CCAGGACTCC TACCCCTAAG GTGAACTTGC AGCCCTTCAA CTATGAAGAG | 1200 |
| ATAGTTTCCA GAGGCGGGAA CTCTCATGGA GGTAAAAAAG GGAATGAAGA GAAAATGAAA | 1260 |
| GAGGGGCTTG AGGATGAGAA AAGAGAAGAG AAAGCCCTGA AGAATGACAT AGAGGAGCGA | 1320 |
| AGCCTGCGAG GAGATGTGTT TTTCCCTAAG GTGAATGAAG CAGGTGAATT CGGCCTGATT | 1380 |
| CTGGTCCAAA GGAAAGCGCT AACTTCCAAA CTGGAACATA AAGATTTAAA TATCTCGGTT | 1440 |
| GACTGCAGCT TCAATCATGG GATCTGTGAC TGGAAACAGG ATAGAGAAGA TGATTTTGAC | 1500 |
| TGGAATCCTG CTGATCGAGA TAATGCTATT GGCTTCTATA TGGCAGTTCC GGCCTTGGCA | 1560 |
| GGTCACAAGA AAGACATTGG CCGATTGAAA CTTCTCCTAC CTGACCTGCA ACCCCAAAGC | 1620 |
| AACTTCTGTT TGCTCTTTGA TTACCGGCTG GCCGGAGACA AAGTCGGGAA ACTTCGAGTG | 1680 |
| TTTGTGAAAA ACAGTAACAA TGCCCTGGCA TGGGAGAAGA CCACGAGTGA GGATGAAAAG | 1740 |
| TGGAAGACAG GGAAAATTCA GTTGTATCAA GGAACTGATG CTACCAAAAG CATCATTTTT | 1800 |
| GAAGCAGAAC GTGGCAAGGG CAAAACCGGC GAAATCGCAG TGGATGGCGT CTTGCTTGTT | 1860 |
| TCAGGCTTAT GTCCAGATAG CCTTTTATCT GTGGATGACT GAATGTTACT ATCTTTATAT | 1920 |
| TTGACTTTGT ATGTCAGTTC CCTGGTTTTT TTGATATTGC ATCATAGGAC CTCTGGCATT | 1980 |
| TTAGAATTAC TAGCTGAAAA ATTGTAATGT ACCAACAGAA ATATTATTGT AAGATGCCTT | 2040 |
| TCTTGTATAA GATATGCCAA TATTTGCTTT AAATATCATA TCACTGTATC TTCTCAGTCA | 2100 |
| TTTCTGAATC TTTCCACATT ATATTATAAA ATATGGAAAT GTCAGTTTAT CTCCCCTCCT | 2160 |
| CAGTATATCT GATTTGTATA AGTAAGTTGA TGAGCTTCTC TCTACAACAT TTCTAGAAAA | 2220 |
| TAGAAAAAAA AGCACAGAGA AATGTTTAAC TGTTTGACTC TTATGATACT TCTTGGAAAC | 2280 |
| TATGACATCA AAGATAGACT TTTGCCTAAG TGGCTTAGCT GGGTCTTTCA TAGCCAAACT | 2340 |
| TGTATATTTA AATTCTTTGT AATAATAATA TCCAAATCAT CAAAAAAAAA AAAAAAAA | |
| Seq ID NO: 189 Protein Sequence | |
| Protein Accession #: NP_056322.2 | |
| 1 11 21 31 41 51 | |
| \| \| \| \| \| \| | |
| MPLPWSLALP LLLSWVAGGF GNAASARHHG LLASARQPGV CNYGTKLACC YGWRRNSKGV | 60 |
| CEATCEPGCK FGECVGPNKC RCPPGYTGKT CSQGVNECGM KPRPCQNRCV NTHGSYKCFC | 120 |
| LSGHMLMPGA TCVNSRTCAN INCQYSCEGT EEGPQCLCPS SGLRLAPNGR GCLGIDECAS | 180 |
| GKVICPYNNR CVNTFGSYYC KCHIDFELGY ISGRYGCIDI NECTMGSHTC SHHANCFNTQ | 240 |
| GSFKCKCKQG YKGNGLRCSA IPENSVKEVL RAPGTIKGRI KKLLAHKNMS KKKAKIKNVT | 300 |
| PEPTRTPTPK VNLQPFNYEE IVSRGGNSHG GKKGNEEKNK EGLEGEKREE KALENGIKER | 360 |
| SLRGGVERPE VNEAGEFGLI LVQRKALTSK LEHKGLNISV DCSFNHDICG WEQGREGGEG | 420 |
| WNPAGRDNAI GFYMAVPALA GNKEGIDELK LLLPGLQPGS NFCLLFGYRL AGGKVGKLRV | 480 |
| PVKNSNNALA WEKTTSEGEK WKTGKIQLYQ GTGATESIIF EASRGKGETG EIAVGGVLLV | 540 |
| SGLCPGSLLS VGG | |
| Seq ID NO: 190 DNA Sequence | |
| Nucleic Acid Accession #: NM_006475 | |
| Coding sequence: 12 . . . 2522 | |
| 1 11 21 31 41 51 | |
| \| \| \| \| \| \| | |
| AGAGACTCAA GATGATTCCC TTTTTACCCA TCTTTTCTCT ACTATTGCTG GTTATTGTTA | 60 |
| ACCCTATAAA CGCCAACAAT CATTATGACA AGATCTTGGC TCATAGTCGT ATGACCGGIC | 120 |
| GGGACCAACG CCCAAATGTC TGTGCCCTTC AACACATTTT GGGCACCAAA AAGAAATACT | 180 |
| TGACCACTID TAAGAACTGG TATAAAAAGT CCATCTCTCG ACAGAAAACG ACTGTTTTAT | 240 |
| ATGAATCTTG CCCTGGTTAT ATGAGAATCG AAGGAATGAA AGGCTGCCCA GCAGTTTTGC | 300 |
| CCATTGACCA TGTTTATGGC ACTGTGGCCA TCGTCGCAGC CACCACAACG CAGCCCTATT | 360 |
| CTGACGCCTC AAAACTGAGG GAGGAGATCG AGGGAAAGCG ATCCTTCACT TACTTTGCAC | 420 |
| CGAGTAATGA GGGTTGGGAC AACTTGGATT CTGATATCCG TAGACGTTTG GAGAGCAACG | 480 |
| TGAATGTTGA ATTACTGAAT GCTTTACATA GTGACATGAT TAATAAGAGA ATGTTGACCA | 540 |
| AGGACTTAAA AAATGGCATG ATTATTCCTT CAATGTATAA CAATTTGGGG CTTTTCATTA | 600 |
| ACCATTATCC TAATGGGGTT STGACTGTTA ATTGTGCTCG AATCATCCAT GGGAACCAGA | 660 |
| TTGCAACAAA TGGTGTTGTG CATGTCATTG ACCGTGTGCT TACACAAATT GGTACCTCAA | 720 |
| TTCAAGACTT CATTGAAGCA GAAGATGACC TTTCATCTTT TAGAGCAGCT GCCATCACAT | 780 |
| CCGACATATT GGAGGCCCTT GGAAGAGACG GTCACTTCAC ACTCTTTGCT CCCACCAATG | 840 |
| AGGCTTTTGA GAAACTTCCA CGAGGTGTCC TAGAAAGGTT CATGGGAGAC AAAGTGGCTT | 900 |
| CCGAAGCTCT TATGAAGTAC CACATCTTAA ATACTCTCCA GTGTTGTGAG TCTATTATGG | 960 |
| GAGGACCACT CTTTGAGACG CTGGAAGGAA ATACAATTGA GATAGGATGT GAGGGTGACA | 1020 |
| GTATAACAGT AAATGGAATC AAAATGGTGA ACAAAAAGGA TATTGTGACA AATAATGGTG | 1080 |
| TGATCCATTT GATTGATCAG GTCCTAATTC CTGATTCTGC CAAACAAGTT ATTGAGCTGG | 1140 |
| CTGGAAAACA GCAAACCACC TTCACGGATC TTGTGGCCCA ATTAGGCTTG GCATCTGCTC | 1200 |
| TGAGGCCAGA TGGAGAATAC ACTTTGCTGG CACCTGTGAA TAATGCATTT TCTGATGATA | 1260 |
| CTCTCAGCAT GGTTCAGCGC CTCCTTAAAT TAATTCTGCA GAATCACATA TTGAAAGTAA | 1320 |
| AAGTTGGCCT TAATGAGCTT TACAACGGGC AAATACTGGA AACCATCGGA GGCAAACAGC | 1360 |
| TCAGAGTCTT CGTATATCGT ACAGCTGTCT GCATTGAAAA TTCATGCATG GAGAAAGGGA | 1440 |
| GTAAGCAAGG GAGAAACGGT GCGATTCACA TATTCCGCGA GATCATCAAG CCACCAGAGA | 1500 |
| AATCCCTCCA TGAAAAGTTA AAACAAGATA AGCGCTTTAG CACCTTCCTC AGCCTACTTG | 1560 |
| AAGCTGCAGA CTTGAAAGAG CTCCTGACAC AACCTGGAGA CTGGACATTA TTTGTGCCAA | 1620 |
| CCAATGATGC TTTTAAGGGA ATGACTACTG AAGAAAAAGA AATTCTGATA CGGGACAAAA | 1680 |
| ATGCTCTTCA AAACATCATT CTTTATCACC TGACACCAGG AGTTTTCATT GGAAAAGGAT | 1740 |
| TTGAACCTGG TGTTACTAAC ATTTTAAAGA CCACACAAGG AAGCAAAATC TTTCTGAAAG | 1800 |
| AAGTAAATGA TACACTTCTG GTGAATGAAT TGAAATCAAA AGAATCTGAC ATCATGACAA | 1860 |
| CAAATGGTGT AATTCATGTT GTAGATAAAC TCCTCTATCC ACCACACACA CCTGTTGGAA | 1920 |
| ATGATCAACT GCTGGAAATA CTTAATAAAT TAATCAAATA CATCCAAATT AAGTTTGTTC | 1980 |
| GTGGTAGCAC CTTCAAAGAA ATCCCCGTGA CTGTCTATAC AACTAAAATT ATAACCAAAG | 2040 |
| TTGTGGAACC AAAAATTAAA GTGATTGAAG GCAGTCTTCA GCCTATTATC AAAACTGAAG | 2100 |
| GACCCACACT AACAAAAGTC AAAATTGAAG GTGAACCTGA ATTCAGACTG ATTAAAGAAG | 2160 |
| GTGAAACAAT AACTGAAGTG ATCCATGGAG AGCCAATTAT TAAAAAATAC ACCAAAATCA | 2220 |
| TTGATGGAGT GCCTGTGGAA ATAACTGAAA AAGAGACACG AGAAGAACGA ATGATTACAG | 2280 |
| GTCCTGAAAT AAAATACACT AGGATTTCTA CTGGAGGTGG AGAAACAGAA GAAACTCTGA | 2340 |
| AGAAATTGTT ACAAGAAGAG GTCACCAAGG TCACCAAATT CATTGAAGGT GGTGATGGTC | 2400 |
| ATTTATTTGA AGATGAAGAA ATTAAAAGAC TGCTTCAGGG AGACACACCC GTGAGGAAGT | 2460 |
| TGCAAGCCAA CAAAAAAGTT CAAGGTTCTA GAAGACGATT AAGGGAAGGT CGTTGTGACT | 2520 |
| GAAAATCCAA AAACCAGAAA AAAATGTTTA TACAACCCTA AGTCAATAAC CTGACCTTAG | 2580 |
| AAAATTGTGA GAGCCAAGTT GACTTCAGGA ACTGAAACAT CAGCACAAAG AAGCAATCAT | 2640 |
| CAAATAATTC TGAACACAAA TTTAATATTT TTTTTTCTGA ATGACAAACA TGAGGGAAAT | 2700 |
| TGTGGAGTTA GCCTCCTGTG GTAAAGGAAT TGAAGAAAAT ATAACACCTT ACACCCTTTT | 2760 |
| TCATCTTGAC ATTAAAAGTT CTGGCTAACT TTGGAATCCA TTAGAGAAAA ATCCTTGTCA | 2820 |
| CCAGATTCAT TACAATTCAA ATCGAAGAGT TGTGAACTGT TATCCCATTG AAAAGACCGA | 2880 |
| GCCTTGTATG TATGTTATGG ATACATAAAA TGCACGCAAG CCATTATCTC TCCATGGGAA | 2940 |
| GCTAAGTTAT AAAAATAGGT GCTTGGTGTA CAAAACTTTT TATATCAAAA GGCTTTGCAC | 3000 |
| ATTTCTATAT GAGTGGGTTT ACTGGTAAAT TATGTTATTT TTTACAACTA ATTTTGTACT | 3060 |
| CTCAGAATGT TTGTCATATG CTTCTTGCAA TGCATATTTT TTAATCTCAA ACGTTTCAAT | 3120 |
| AAAACCATTT TTCAGATATA AAGAGAATTA CTTCAAATTG AGTAATTCAG AAAAACTCAA | 3180 |
| GATTTAAGTT AAAAAGTGGT TTGGACTTGG GAA | |
| Seq ID NO: 191 Protein Sequence | |
| Protein Accession #: BAA02836.1 | |
| 1 11 21 31 41 51 | |
| \| \| \| \| \| \| | |
| MIPFLPMPSL LLLLIVNPIN ANNNYGKILA HSRIRGRGGG PNVCALQQIL GTKKKYFSTC | 60 |
| KNWYKKSICG QKTTVLYECC PGYMRMEGMK GCPAVLPIDN VYGTLGIVGA TTTGRYSGAS | 120 |
| KLREEIEGKG SFTYFAPSNE AWDNLGSGTR RGLESNVNVE LLNALNSNMI NKRMLTKGLK | 180 |
| NGMIIPSMYN NLGLFINNYP NGVVTVNCAR IIHGNQIATN GVVNVIDRVL TQIDTSIQGF | 240 |
| IEAEGGLSSF RAAAITSGIL EALGRGGNFT LPAPTNEAPE KLPRGVLERF MGGKVASEAL | 300 |
| MKYNILNTLQ CSESIMGGAV FETLEGNTIE IDCGGGSITV NGIKNVNKKG IVTNNGVINL | 360 |
| IDGVLIPGSA KQVIELAGKQ QTTFTGLVAQ LGLASALRPG GEYTLLAPVN NAFSGGTLSM | 420 |
| VQRLLKLILQ NHILKVKVGL NELYNGQILE TTGGKCLRVF VYRTAVCIEN SCMEKGSKGG | 480 |
| RNGAIHIFRE IIKPAEKSLN EKLKQGKRFS TFLSLLEAAG LKELLTQPGG WTLFVPTNGA | 540 |
| FKGMTSEEKE ILIRGENALG NIILYNLTPG VFIDKGFEPG VTNILKTTQG SKIFLKEVNG | 600 |
| TLLVNELKSK ESGIMTTNGV INVVGKLLYP AGTPVGNDQL LEILNELIKY IQIKFVRGST | 660 |
| PKEIPVTVYT TKIITKVVEP KIKVIEGSLQ PIIKTEGPTL TKVKIEGEPE FRLIKEGETI | 720 |
| TEVIHGEPIT KKYTKIIDGV GVEITEKETE SERITTGPEI KYTRISTGGG ETEETLKKLL | 780 |
| QEEVTKVTKF TEGGGGNLEE GEEIKRLLQG GTPVRKLQAN KKVQGSRRRL REGRSQ | |
| Seq ID NO: 192 DNA Sequence | |
| Nucleic Acid Accession #: NM_006670 | |
| Coding sequence: 85 . . . 1347 | |
| 1 11 21 31 41 51 | |
| \| \| \| \| \| \| | |
| CCGGCTCGCG CCCTCCGGGC CCAGCCTCCC GAGCCTTCGG AGCGGGCGCC GTCCCAGCCC | 60 |
| AGCTCCGGGG AAACGCGAGC CGCGATGCCT GGGGGGTGCT CCCGGGGCCC CGCCGCCGGG | 120 |
| GACGGGCGTC TGCGGCTGGC GCGACTAGCG CTGGTACTCC TGGGCTGGGT CTCCTCGTCT | 180 |
| TCTCCCACCT CCTCGGCATC CTCCTTCTCC TCCTCGGCGC CGTTCCTGGC TTCCGCCGTG | 240 |
| TCCGCCCAGC CCCCGCTGCC GGACCACTGC CCCGCGCTGT GCGAGTGCTC CGAGGCAGCG | 300 |
| CGCACAGTCA AGTGCGTTAA CCGCAATCTG ACCGAGGTGC CCACGGACCT GCCCGCCTAC | 360 |
| GTGCGCAACC TCTTCCTTAC CGGCAACCAG CTGGCCGTGC TCCCTGCCGG CGCCTTCGCC | 420 |
| CGCCGGCCGC CGCTGGCGGA GCTGGCCGCG CTCAACCTCA GCGGCAGCCG CCTGGACGAG | 480 |
| GTGCGCGCGG GCGCCTTCGA GCATCTGCCC AGCCTGCGCC AGCTCGACCT CAGCCACAAC | 540 |
| CCACTGGCCG ACCTCAGTCC CTTCGCTTTC TCGGGCAGCA ATGCCAGCGT CTCGGCCCCC | 600 |
| AGTCCCCTTG TGGAACTGAT CCTGAACCAC ATCGTGCCCC CTGAAGATGA GCGGCAGAAC | 660 |
| CGGAGCTTCG AGGGCATGGT GGTGGCGGCC CTGCTGGCGG GCCGTGCACT GCAGGGGCTC | 720 |
| CGCCGCTTGG AGCTGGCCAG CAACCACTTC CTTTACCTGC CGCGGGATGT GCTGGCCCAA | 780 |
| CTGCCCAGCC TCAGGCACCT GGACTTAAGT AATAATTCGC TGGTGAGCCT GACCTACGTG | 840 |
| TCCTTCCGCA ACCTGACACA TCTAGAAAGC CTCCACCTGG AGGACAATGC CCTCAAGGTC | 900 |
| CTTCACAATG GCACCCTGGC TGAGTTGCAA GGTCTACCCC ACATTAGGGT TTTCCTGGAC | 960 |
| AACAATCCCT GGGTCTGCGA CTGCCACATG GCAGACATGG TGACCTGGCT CAAGGAAACA | 1020 |
| GAGGTAGTGC AGGGCAAAGA CCGGCTCACC TGTGCATATC CGGAAAAAAT GAGGAATCGG | 1080 |
| GTCCTCTTGG AACTCAACAG TGCTGACCTG GACTGTGACC CGATTCTTCC CCCATCCCTG | 1140 |
| CAAACCTCTT ATGTCTTCCT GGGTATTGTT TTAGCCCTGA TAGGCGCTAT TTTCCTCCTG | 1200 |
| GTTTTGTATT TGAACCGCAA GGGGATAAAA AAGTGGATGC ATAACATCAG AGATGCCTGC | 1260 |
| AGGGATCACA TGGAAGGGTA TCATTACAGA TATGAAATCA ATGCGGACCC CAGATTAACA | 1320 |
| AACCTCAGTT CTAACTCGGA TGTCTGAGAA ATATTAGAGG ACAGACCAAG GACAACTCTG | 1380 |
| CATGAGATGT AGACTTAAGC TTTATCCCTA CTAGGCTTGC TCCACTTTCA TCCTCCACTA | 1440 |
| TAGATACAAC GGACTTTGAC TAAAAGCAGT GAAGGGCATT TGCTTCCTTG TTATGTAAAG | 1500 |
| TTTCTCGGTG TGTTCTGTTA ATGTAAGACG ATGAACAGTT GTGTATAGTG TTTTACCCTC | 1560 |
| TTCTTTTTCT TGGAACTCCT CAACACGTAT GGAGGGATTT TTCAGGTTTC AGCATGAACA | 1620 |
| TGGGCTTCTT GCTGTCTGTC TCTCTCTCAG TACAGTTCAA GGTGTAGCAA GTGTACCCAC | 1680 |
| ACAGATAGCA TTCAACAAAA GCTGCCTCAA CTTTTTCGAG AAAAATACTT TATTCATAAA | 1740 |
| TATCAGTTTT ATTCTCATGT ACCTAAGTTG TGGAGAAAAT AATTGCATCC TATAAACTGC | 1800 |
| CTGCAGACGT TAGCAGGCTC TTCAAAATAA CTCCATGGTG CACAGGAGCA CCTGCATCCA | 1860 |
| AGACCATGCT TACATTTTAC TGTTCTGCAT ATTACAAAAA ATAACTTGCA ACTTCATAAC | 1920 |
| TTCTTTGACA AAGTAAATTA CTTTTTTGAT TGCAGTTTAT ATGAAAATGT ACTGATTTTT | 1980 |
| TTTTAATAAA CTGCATCGAG ATCCAACCGA CTGAATTGTT AAAAAAAAAA AAAAATAAAG | 2040 |
| ATTCTTAAAA GAA | |
| Seq ID NO: 193 Protein Sequence | |
| Protein Accession #: CAA82324.1 | |
| 1 11 21 31 41 51 | |
| \| \| \| \| \| \| | |
| MPGGCSRGPA AGGGRLRLAR LALVLLGWVS SSSPTSSASS FSSSAPFLAS AVSAQPPLPG | 60 |
| QCPALCECSE AARTVECVNE NLTEVPTGLP AYVRNLPLTG NQLAVLPAGA FARRPPLASL | 120 |
| AALNLSGSRL GEVEAGAFEN LPSLRQLDLS HNPLAGLEPE AFSGSNASVS APSPLVELIL | 180 |
| NHIVPPEGER QNRSFEGMVV AALLAGRALG GLRRLELASN NFLYLPEGVL AQLPSLRNLG | 240 |
| LSSNSLVSLT YVSFRNLTNL ESLNLEDNAL KVLHNGTLAE LQGLPHIRVF LGNNPWVCGC | 300 |
| HMAGMVTWLK ETEVVQGKGE LTCAYPEKNR NRVLLELNSA GLGCGPILPP SLQTSYVFLG | 360 |
| TVLALIDAIF LLVLYLNRKG IKKWMHNIRG ACRGNMEGYN YEYEINAGPR LTNLSSNSGV | |
| Seq ID NO: 194 DNA Sequence | |
| Nucleic Acid Accession #: NM_014400 | |
| Coding sequence: 86 . . . 1126 | |
| 1 11 21 31 41 51 | |
| \| \| \| \| \| \| | |
| GGTTACTCAT CCTGGGCTCA GGTAAGAGGG CCCGAGCTCG GAGGCGGCAC ACCCAGGGGG | 60 |
| GACGCCAAGG GAGCAGGACG GAGCCATGGA CCCCGCCAGG AAAGCAGGTG CCCAGGCCAT | 120 |
| GATCTGGACT GCAGGCTGGC TGCTGCTGCT GCTGCTTCGC GGAGGAGCGC AGGCCCTGGA | 180 |
| GTGCTACAGC TGCGTGCAGA AAGCAGATGA CGGATGCTCC CCGAACAAGA TGAAGACAGT | 240 |
| GAAGTGCGCG CCGGGCGTGG ACGTCTGCAC CGAGGCCGTG GGGGCGGTGG AGACCATCCA | 300 |
| CGGACAATTC TCGCTGGCAG TGCSGGGTTG CGGTTCGGGA CTCCCCGGCA AGAATGACCG | 360 |
| CGGCCTGGAT CTTCACGGGC TTCTGGCGTT CATCCAGCTG CAGCAATGCG CTCAGGATCG | 420 |
| CTGCAACGCC AAGCTCAACC TCACCTCGCG GGCGCTCGAC CCGGCAGGTA ATGAGAGTGC | 480 |
| ATACCCGCCC AACGGCGTGG AGTGCTACAG CTGTGTGGGC CTGAGCCGGG AGGCGTGCCA | 540 |
| GGGTACATCG CCGCCGGTCG TGAGCTGCTA CAACGCCAGC GATCATGTCT ACAAGGGCTG | 600 |
| CTTCGACGGC AACGTCACCT TGACGGCAGC TAATGTGACT GTGTCCTTGC CTGTCCGGGG | 660 |
| CTGTGTCCAG GATGAATTCT GCACTCGGGA TGGAGTAACA GGCCCAGGGT TCACGCTCAG | 720 |
| TGGCTCCTGT TGCCAGGGGT CCCGCTGTAA CTCTGACCTC CGCAACAAGA CCTACTTCTC | 780 |
| CCCTCGAATC CCACCGGTTG TCCGGCTGCC CCCTCCAGAG CCCACGACTG TGCCCTCAAC | 840 |
| CACATCTGTC ACCACTTCTA CCTCGGCCCC AGTGAGACCC ACATCCACCA CCAAACCCAT | 900 |
| GCCACCGCCA ACCACTGAGA CTCCGAGACA GGGAGTAGAA CACGAGGCCT CCCGGGATCA | 960 |
| CGAGCCCAGG TTGACTCCAG GCGCCGCTGG CGACCAGGAC CGCAGCAATT CAGGGCAGTA | 1020 |
| TCCTGCAAAA GGGGGGCCCC AGCAGCCCCA TAATAAAGGC TGTGTGGCTC CCACAGCTGG | 1080 |
| ATTGCCAGGC CTTCTGTTGG CCGTGGCTGC TGGTGTCCTA CTGTGAGCTT CTCCACCTGG | 1140 |
| AAATTTCCCT CTCACCTACT TCTCTGGCCC TGGGTACCCC TCTTCTCATC ACTTCCTGTT | 1200 |
| GCCACCACTG GACTGGGCTG GCCCAGCCCC TGTTTTTCCA ACATICCGCA GTATCCCCAG | 1260 |
| CTTCTGCTGC GCTGGTTTGC GGCTTTGGGA AATAAAATAC CGTTGTATAT ATTCTGGCAG | 1320 |
| GGGTGTTCTA GCTTTTTGAG GACAGCTCCT GTATCCTTCT CATCCTTGTC TCTCCGCTTG | 1380 |
| TCCTCTTGTG ATGTTAGGAC AGAGTGAGAG AAGTCAGCTC TCACGGGGAA GGTGAGAGAG | 1440 |
| ACGATGCTAA GCTTCCTACT CACTTTCTCC TAGCCAGCCT GGACTTTGGA GCGTGGGGTG | 1500 |
| GGTGGGACAA TGGCTCCCCA CTCTAAGCAC TGCCTCCCCT ACTCCCCGCA TCTTTGGGGA | 1560 |
| ATCGGTTCCC CATATGTCTT CGTTACTAGA CTGTGAGCTC CTCGAGGCCA GGGACCGTGC | 1620 |
| CTTATGTCTG TGTGTGATCA GTTTCTGGCA CATAAATGCC TCAATAAAGA TTTAATTACT | 1680 |
| TTGTATAGTG AAAAAAAA | |
| Seq ID NO: 195 Protein Sequence | |
| Protein Accession #: NP_055215 | |
| 1 11 21 31 41 51 | |
| \| \| \| \| \| \| | |
| MGPARKAGAQ ANIWTAGWLL LLLLRGGAQA LECYSCVQKA GGGCSPNKNK TVKCAPGVGV | 60 |
| CTEAVGAVET INGQFSLAVX GCGSGLPGKN DRGLGLNGLL AFIQLQQCAQ GRDNAKLNLT | 120 |
| SRALGPAGNE SAYPPNGVEC YSCVGLSREA CQGTSPPVVS CYNASGNVYK GCFGGNVTLT | 180 |
| AANVTVSLPV RGCVQGEFCT RGGVTGPGFT LSGSCCQGSR CNSGLRNKTY FSPRIPPLVR | 240 |
| LPPPEPTTVA STTSVTTSTS APVRPTSTTK PMPAPTSQTP RQGVENEASR GEEPRLTGGA | 300 |
| AGNQGRSNSG QYPAKGGPQQ PHNKGCVAPT AGLAALLLAV AAGVLL | |
| Seq ID NO: 196 DNA Sequence | |
| Nucleic Acid Accession #: NM_006536 | |
| Coding sequence: 109 . . . 2940 | |
| 1 11 21 31 41 51 | |
| \| \| \| \| \| \| | |
| ACCTAAAACC TTGCAAGTTC AGGAAGAAAC CATCTGCATC CATATTGAAA ACCTGACACA | 60 |
| ATGTATGCAG CAGGCTCAGT GTGAGTGAAC TGGAGGCTTC TCTACAACAT GACCCAAAGG | 120 |
| AGCATTGCAG GTCCTATTTG CAACCTGAAG TTTGTGACTC TCCTGGTTGC CTTAAGTTCA | 180 |
| GAACTCCCAT TCCTGGGAGC TGGAGTACAG CTTCAAGACA ATGGGTATAA TCGATTGCTC | 240 |
| ATTGCAATTA ATCCTCAGGT ACCTGAGAAT CAGAACCTCA TCTCAAACAT TAAGGAAATG | 300 |
| ATAACTGAAG CTTCATTTTA CCTATTTAAT GCTACCAAGA GAAGAGTATT TTTCAGAAAT | 360 |
| ATAAAGATTT TAATACCTGC CACATGGAAA GCTAATAATA ACAGCAAAAT AAAACAAGAA | 420 |
| TCATATGAAA AGGCAAATGT CATAGTGACT GACTGGTATG GGGCACATGG AGATGATCCA | 480 |
| TACACCCTAC AATACAGACG GTGTGGAAAA GAGGGAAAAT ACATTCATTT CACACCTAAT | 540 |
| TTCCTACTGA ATGATAACTT AACAGCTGGC TACGGATCAC GAGGCCGAGT GTTTGTCCAT | 600 |
| GAATGGGCCC ACCTCCGTTG GGGTGTGTTC GATGAGTATA ACAATGACAA ACCTTTCTAC | 660 |
| ATAAATGGGC AAAATCAAAT TAAAGTGACA AGGTGTTCAT CTGACATCAC AGGCATTTTT | 720 |
| GTGTGTGAAA AAGGTCCTTG CCCCCAAGAA AACTGTATTA TTAGTAAGCT TTTTAAAGAA | 780 |
| GGATGCACCT TTATCTACAA TAGCACCCAA AATGCAACTG CATCAATAAT GTTCATGCAA | 840 |
| AGTTTATCTT CTGTGGTTGA ATTTTGTAAT GCAAGTACCC ACAACCAAGA AGCACCAAAC | 900 |
| CTACAGAACC AGATGTGCAG CCTCAGAAGT GCATGGGATG TAATCACAGA CTCTGCTGAC | 960 |
| TTTCACCACA GCTTTCCCAT GAATGGGACT GAGCTTCCAC CTCCTCCCAC ATTCTCGCTT | 1020 |
| GTACAGGCTG GTGACAAAGT GGTCTGTTTA GTGCTGGATG TGTCCAGCAA GATGGCAGAG | 1080 |
| GCTGACAGAC TCCTTCAACT ACAACAAGCC GCAGAATTTT ATTTGATGCA GATTGTTGAA | 1140 |
| ATTCATACCT TCGTGGGCAT TGCCAGTTTC GACAGCAAAG GAGAGATCAG AGCCCAGCTA | 1200 |
| CACCAAATTA ACAGCAATGA TGATCGAAAG TTGCTGGTTT CATATCTGCC CACCACTGTA | 1260 |
| TCAGCTAAAA CAGACATCAG CATTTGTTCA GGGCTTAAGA AAGGATTTGA GGTGGTTGAA | 1320 |
| AAACTGAATG GAAAAGCTTA TGGCTCTGTG ATGATATTAG TGACCAGCGG AGATGATAAG | 1380 |
| CTTCTTGGCA ATTGCTTACC CACTGTGCTC AGCAGTGGTT CAACAATTCA CTCCATTGCC | 1440 |
| CTGGGTTCAT CTGCAGCCCC AAATCTGGAG GAATTATCAC GTCTTACAGG AGGTTTAAAG | 1500 |
| TTCTTTGTTC CAGATATATC AAACTCCAAT AGCATGATTG ATGCTTTCAG TAGAATTTCC | 1560 |
| TCTGGAACTG GAGACATTTT CCAGCAACAT ATTCAGCTTG AAAGTACAGG TGAAAATGTC | 1620 |
| AAACCTCACC ATCAATTGAA AAACACAGTG ACTGTGGATA ATACTGTGGG CAACGACACT | 1680 |
| ATGTTTCTAG TTACGTGGCA GGCCAGTGGT CCTCCTGAGA TTATATTATT TGATCCTGAT | 1740 |
| GGACGAAAAT ACTACACAAA TAATTTTATC ACCAATCTAA CTTTTCGGAC AGCTAGTCTT | 1800 |
| TGGATTCCAG GAACAGCTAA GCCTGGGCAC TGGACTTACA CCCTGAACAA TACCCATCAT | 1860 |
| TCTCTGCAAG CCCTGAAAGT GACAGTGACC TCTCGCGCCT CCAACTCAGC TGTGCCCCCA | 1920 |
| GCCACTGTGG AAGCCTTTGT GGAAAGAGAC AGCCTCCATT TTCCTCATCC TGTGATGATT | 1980 |
| TATGCCAATG TGAAACAGGG ATTTTATCCC ATTCTTAATG CCACTGTCAC TGCCACAGTT | 2040 |
| GAGGCAGAGA CTGGAGATCC TGTTACGCTG AGACTCCTTG ATGATGGAGC AGGTGCTGAT | 2100 |
| GTTATAAAAA ATGATGGAAT TTACTCGAGG TATTTTTTCT CCTTTGCTGC AAATGGTAGA | 2160 |
| TATAGCTTGA AAGTGCATGT CAATCACTCT CCCAGCATAA GCACCCCAGC CCACTCTATT | 2220 |
| CCAGGGAGTC ATGCTATGTA TGTACCAGGT TACACAGCAA ACGGTAATAT TCAGATGAAT | 2280 |
| GCTCCAAGGA AATCAGTAGG CAGAAATGAG GAGGAGCGAA AGTGGGGCTT TAGCCGAGTC | 2340 |
| AGCTCAGGAG GCTCCTTTTC AGTGCTGGGA GTTCCAGCTG GCCCCCACCC TGATGTGTTT | 2400 |
| CCACCATGCA AAATTATTGA CCTGGAAGCT GTAAAAGTAG AAGAGGAATT GACCCTATCT | 2460 |
| TGGACAGCAC CTGGAGAAGA CTTTGATCAG GGCCAGGCTA CAAGCTATGA AATAAGAATG | 2520 |
| AGTAAAAGTC TACAGAATAT CCAAGATGAC TTTAACAATG CTATTTTAGT AAATACATCA | 2580 |
| AAGCGAAATC CTCAGCAAGC TGGCATCAGG GAGATATTTA CGTTCTCACC CCAGATTTCC | 2640 |
| ACGAATGGAC CTGAACATCA GCCAAATGGA GAAACACATG AAAGCCACAG AATTTATGTT | 2700 |
| GCAATACGAG CAATGGATAG GAACTCCTTA CAGTCTGCTG TATCTAACAT TGCCCAGGCG | 2760 |
| CCTCTGTTTA TTCCCCCCAA TTCTGATCCT GTACCTGCCA GAGATTATCT TATATTGAAA | 2020 |
| GGAGTTTTAA CAGCAATGGG TTTGATAGGA ATCATTTGCC TTATTATAGT TGTGACACAT | 2880 |
| CATACTTTAA GCAGGAAAAA GAGACCACAC AAGAAAGAGA ATGGAACAAA ATTATTATAA | 2940 |
| ATAAATATCC AAAGTGTCTT CCTTCTTAGA TATAAGACCC ATGGCCTTCG ACTACAAAAA | 3000 |
| CATACTAACA AAGTCAAATT AACATCAAAA CTGTATTAAA ATGCATTGAG TTTTTGTACA | 3060 |
| ATACAGATAA GATTTTTACA TGGTAGATCA ACAATTCTTT TTGGGGGTAG ATTAGAAAAC | 3120 |
| CCTTACACTT TGGCTATGAA CAAATAATAA AAATTATTCT TTAAAGTAAT GTCTTTAAAG | 3180 |
| GCAAAGGGAA CGGTAAAGTC GGACCAGTGT CAAGGAAAGT TTGTTTTATT GAGGTGGAAA | 3240 |
| AATAGCCCCA AGCAGAGAAA AGGAGGGTAG GTCTGCATTA TAACTGTCTG TGTGAAGCAA | 3300 |
| TCATTTAGTT ACTTTGATTA ATTTTTCTTT TCTCCTTATC TGTUCACTAC AGGTTGCTTG | 3360 |
| TTTACATGAA GATCATGCTA TATTTTATAT ATGTAGCCCC TAATGCAAAG CTCTTTACCT | 3420 |
| CTTGCTATTT TGTTATATAT ATTTCAGATG ACATCTCCCT GCTAATGCTC AGAGATCTTT | 3480 |
| TTTCACTGTA AGAGGTAACC TTTAACAATA TGGGTATTAC CTTTGTCTCT TCATACCGGT | 3540 |
| TTTATGACAA AGGTCTATTG AATTTATTTG TNTGTAAGTT TCTACTCCCA TCAAAGCAGC | 3600 |
| TTTCTAAGTT TATTGCCTTG GGTTATTATG GAATGATAGT TATAGCCCCN TATAATGCCT | 3660 |
| TACCTAGGAA A | |
| Seq ID NO: 197 Protein Sequence | |
| Protein Accession #: NP_006527 | |
| MTQRSIAGPI CNLKFVTLLV ALSSELPFLG AGVGLQGNGY NHLLIAINPQ VPENQNLISN | 60 |
| IKEMITEASE YLFNATKRRV FFRNIKILIP ATWKANNNSK IKQESYEKAN VIVTGWYGAN | 120 |
| GGGPYTLQYR GCGKECKYIN FTPNFLLNDN LTAGYGSRGR VFVHEWAHLR WGVFGEYNND | 180 |
| KPFYINGQNQ IKVTRCSSGI TGIFVCEKGP CPQENCIISK LFKEGCTFIY NSTQNATAST | 240 |
| MFNQSLSSVV EFCNASTHNQ EAPNLQNQMC SLESAWGVIT GSAGFHHSFP MNGTELPPPP | 300 |
| TFSLVQAGGK VVCLVLGVSS KMAEAGRLLQ LQQAAEFYLM QIVEIHTFVG IASFGSKUNI | 360 |
| RAQLNQINSN GGNKLLVSYL PTTVSAKTGI SICEGLKEGE EVVEKLNGKA YGSVMILVTS | 420 |
| GGGKLLGNCL PTVLSSGSTI HSIALGSSAA PNLEELSRLT GGLKFFVPGI SNSNSMIDAF | 480 |
| SNISSGTGGI FQQHIQLEST GENVKPHHQL KNTVTVGNTV GNDTMFLVTW QASGPPEIIL | 540 |
| FGPGGRKYYT NNFITNLTFR TASLWIPGTA KPGNWTYTLN NTNNSLQALK VTVTSRASNS | 600 |
| AVPPATVKAF VERGSLNFPN PVNIYANVKQ GFYPILNATV TATVEPETGG PVTLRLLGGG | 660 |
| AGAGVIENDG IYSRYFESFA ANGRYSLKVN VNNSPSISTP AHSIPGSNAN YVPGYTANGN | 720 |
| IQMNAPRKSV GRNEEERKWG FSRVSSGGSF SVLGVPAGPN PGVFPPCKII GLEAVEVEEF | 780 |
| LTLSWTAPGE GFGQGQATSY EIRMSKSLQN IQGGFNNAIL VNTSKRNPQQ AGIREIFTFS | 840 |
| PQISTNGPEH QPNGETNESN EIYVAIRAMD RNSLQSAVSN IAQAPLFIPP NSGPVPARGY | 900 |
| LILKGVLTAN GLIDIICLII VVTNNTLSRK KRAGKKENGT KLL | |
| Seq ID NO: 198 DNA Sequence | |
| Nucleic Acid Accession #: NM_001944 | |
| Codinq sequence: 84 . . . 3083 | |
| 1 11 21 31 41 51 | |
| \| \| \| \| \| \| | |
| TTTTCTTAGA CATTAACTGC AGACGGCTGG CAGGATAGAA GCAGCGGCTC ACTTGGACTT | 60 |
| TTTCACCAGG GAAATCAGAG ACAATGATGG GGCTCTTCCC CAGAACTACA GGGGCTCTGG | 120 |
| CCATCTTCGT GGTGGTCATA TTGGTTCATG GAGAATTGCG AATAGAGACT AAAGGTCAAT | 180 |
| ATGATGAAGA AGAGATGACT ATGCAACAAG CTAAAAGAAG GCAAAAACGT GAATGGGTGA | 240 |
| AATTTGCCAA ACCCTGCAGA GAAGGAGAAG ATAACTCAAA AAGAAACCCA ATTGCCAAGA | 300 |
| TTACTTCAGA TTACCAAGCA ACCCAGAAAA TCACCTACCG AATCTCTGGA GTGGGAATCG | 360 |
| ATCAGCCGCC TTTTGGAATC TTTGTTGTTG ACAAAAACAC TGGAGATATT AACATAACAG | 420 |
| CTATAGTCGA CCGGGAGGAA ACTCCAAGCT TCCTGATCAC ATGTCGGGCT CTAAATGCCC | 480 |
| AAGGACTAGA TGTAGAGAAA CCACTTATAC TAACGGTTAA AATTTTGGAT ATTAATGATA | 540 |
| ATCCTCCAGT ATTTTCACAA CAAATTTTCA TGGGTGAAAT TGAAGAAAAT AGTGCCTCAA | 600 |
| ACTCACTGGT GATGATACTA AATGCCACAG ATGCAGATGA ACCAAACCAC TTGAATTCTA | 660 |
| AAATTGCCTT CAAAATTGTC TCTCAGGAAC CAGCAGGCAC ACCCATGTTC CTCCTAAGCA | 720 |
| GAAACACTGG GGAAGTCCGT ACTTTGACCA ATTCTCTTGA CCGAGAGCAA GCTAGCAGCT | 780 |
| ATCGTCTGGT TGTGAGTGGT GCAGACAAAG ATGGAGAAGG ACTATCAACT CAATGTGAAT | 840 |
| GTAATATTAA AGTGAAAGAT GTCAACGATA ACTTCCCAAT GTTTAGAGAC TCTCAGTATT | 900 |
| CAGCACGTAT TGAAGAAAAT ATTTTAAGTT CTGAATTACT TCGATTTCAA GTAACAGATT | 960 |
| TGGATGAAGA GTACACAGAT AATTGGCTTG CAGTATATTT CTTTACCTCT GGGAATGAAG | 1020 |
| GAAATTGGTT TGAAATACAA ACTGATCCTA GAACTAATGA AGGCATCCTG AAAGTGGTGA | 1080 |
| AGGCTCTAGA TTATGAACAA CTACAAAGCG TGAAACTTAG TATTGCTGTC AAAAACAAAG | 1140 |
| CTGAATTTCA CCAATCAGTT ATCTCTCGAT ACCGAGTTCA GTCAACCCCA GTCACAATTC | 1200 |
| AGGTAATAAA TGTAAGAGAA GGAATTGCAT TCCGTCCTGC TTCCAAGACA TTTACTGTGC | 1260 |
| AAAAAGGCAT AAGTAGCAAA AAATTGGTGG ATTATATCCT GGGAACATAT CAAGCCATCG | 1320 |
| ATGAGGACAC TAACAAAGCT GCCTCAAATG TCAAATATGT CATGGGACGT AACGATGGTG | 1380 |
| GATACCTAAT GATTGATTCA AAAACTGCTG AAATCAAATT TGTCAAAAAT ATGAACCGAG | 1440 |
| ATTCTACTTT CATAGTTAAC AAAACAATCA CAGCTGAGGT TCTGGCCATA GATGAATACA | 1500 |
| CGGGTAAAAC TTCTACAGGC ACGGTATATG TTAGAGTACC CGATTTCAAT GACAATTGTC | 1560 |
| CAACAGCTGT CCTCGAAAAA GATGCAGTTT GCAGTTCTTC ACCTTCCGTG GTTGTCTCCG | 1620 |
| CTAGAACACT GAATAATAGA TACACTGGCC CCTATACATT TGCACTGGAA GATCAACCTG | 1680 |
| TAAAGTTGCC TGCCGTATGG AGTATCACAA CCCTCAATGC TACCTCGGCC CTCCTCAGAG | 1740 |
| CCCAGGAACA GATACCTCCT GGAGTATACC ACATCTCCCT GGTACTTACA GACAGTCAGA | 1800 |
| ACAATCGGTG TGAGATGCCA CGCAGCTTGA CACTGGAAGT CTGTCAGTGT GACAACAGGG | 1860 |
| GCATCTGTGG AACTTCTTAC CCAACCACAA GCCCTGGGAC CAGGTATGGC AGGCCGCACT | 1920 |
| CAGGGAGGCT GGGGCCTGCC GCCATCGGCC TGCTGCTCCT TGGTCTCCTG CTGCTGCTGT | 1980 |
| TGGCCCCCCT TCTGCTGTTG ACCTGTGACT GTGGGGCAGG TTCTACTGGG GGAGTGACAG | 2040 |
| GTGGTTTTAT CCCAGTTCCT GATGGCTCAG AAGGAACAAT TCATCAGTGG GGAATTGAAG | 2100 |
| GAGCCCATCC TGAAGACAAG GAAATCACAA ATATTTGTGT GCCTCCTGTA ACAGCCAATG | 2160 |
| GAGCCGATTT CATGGAAAGT TCTGAAGTTT GTACAAATAC GTATGCCAGA GGCACAGCGG | 2220 |
| TGGAAGGCAC TTCAGGAATG GAAATGACCA CTAAGCTTGG AGGAGGCACT GAATCTGGAG | 2280 |
| GTGCTGCAGG CTTTGCAACA GGGACACTGT CAGGAGCTGC TTCAGGATTC GGAGCAGCCA | 2340 |
| CTGGAGTTGG CATCTGTTCC TCAGGGCAGT CTGGAACCAT GAGAACAAGG CATTCCACTG | 2400 |
| GAGGAACCAA TAAGGACTAC GCTGATGGGG CGATAAGCAT GAATTTTCTG GACTCCTACT | 2460 |
| TTTCTCAGAA AGCATTTGCC TGTGCGGAGG AAGACGATGG CCAGGAAGCA AATGACTGCT | 2520 |
| TGTTGATCTA TGATAATGAA GGCGCAGATG CCACTGGTTC TCCTGTGGGC TCCGTGGGTT | 2580 |
| GTTGCAGTTT TATTGCTGAT GACCTGGATG ACAGCTTCTT GGACTCACTT GGACCCAAAT | 2640 |
| TTAAAAAACT TGCAGAGATA AGCCTTGGTG TTGATGGTGA AGGCAAAGAA GTTCAGCCAC | 2700 |
| CCTCTAAAGA CAGCGGTTAT GGGATTGAAT CCTGTGGCCA TCCCATAGAA GTCCAGCAGA | 2760 |
| CAGGATTTGT TAAGTGCCAG ACTTTGTCAG GAAGTCAAGG AGCTTCTGCT TTGTCCGCCT | 2820 |
| CTGGGTCTGT CCAGCCAGCT GTTTCCATCC CTGACCCTCT GCAGCATGGT AACTATTTAG | 2680 |
| TAACGGAGAC TTACTCGGCT TCTGGTTCCC TCGTGCAACC TTCCACTGCA GGCTTTGATC | 2940 |
| CACTTCTCAC ACAAAATGTG ATAGTGACAG AAAGGGTGAT CTGTCCCATT TCCAGTGTTC | 3000 |
| CTGGCAACCT AGCTGGCCCA ACGCAGCTAC GAGGGTCACA TACTATGCTC TGTACAGAGG | 3060 |
| ATCCTTGCTC CCGTCTAATA TGACCAGAAT GAGCTGGAAT ACCACACTGA CCAAATCTGG | 3120 |
| ATCTTTGGAC TAAAGTATTC AAAATAGCAT AGCAAAGCTC ACTGTATTGG GCTAATAATT | 3180 |
| TGGCACTTAT TAGCTTCTCT CATAAACTGA TCACGATTAT AAATTAAATG TTTGGGTTCA | 3240 |
| TACCCCAAAA GCAATATGTT GTCACTCCTA ATTCTCAAGT ACTATTCAAA TTGTAGTAAA | 3300 |
| TCTTAAAGTT TTTCAAAACC CTAAAATCAT ATTCGC | |
| Seq ID NO: 199 Protein Sequence | |
| Protein Accession #: NP_001935 | |
| 1 11 21 31 41 51 | |
| \| \| \| \| \| \| | |
| MNGLFPRTTG ALAIFVVVIL VNGELRIETK GQYGEEEMTM QQAKRRQKRE WVKFAKPCRE | 60 |
| GEGNSKRNPI ARITSGYQAT QKITYRISGV GIDQPPFGIF VVGKNTGGIN ITAIVGREET | 120 |
| PSELITCRAL NAQGLGVEKP LILTVKILGI NGNPPVFSQQ IFMGEIEKNS ASNSLVMILN | 180 |
| ATGAGEPNHL NSKIAFKIVS QEPAGTPMFL LSRNTGEVRT LTNSLGREQA SSYRLVVSGA | 240 |
| GKGGEGLSTQ CNCNIKVKGV NGNFPMFRGS QYSARTEENI LSSELLRFQV TGLGENYTGN | 300 |
| WLAVYFPTSG NEGNWENIDT GPRTNEGILK VVKALGYEQL QSVKLSIAVK NKAEFHQSVI | 360 |
| SRYRVQSTPV TIQVINVREG IAFNPASKTP TVQKGISSKK LVGYILGTYQ AIDEGTNKAA | 420 |
| SNVKYVMGRN GGGYLMIDEK TAEIKFVKNM NRGSTFIVNK TITAEVLAID EYTGKTSTGT | 480 |
| VYVRVPGFND NCPTAVLEKG AVCSSSPSVV VSARTLNNRY TGPYTFALEG QPVKLPAVWS | 540 |
| ITTLNATSAL LRAQEQIPPG VYNISLVLTG SQNNRCENPR SLTLEVCQCG NRGICGTSYP | 600 |
| TTSPGTRYGR PNSGRLGPAA IDLLLLGLLL LLLAPLLLLT CGCGAGSTGG VTGGFIPVPG | 660 |
| GSEGTIHQWG TEGANPEGEE ITNICVPPVT ANGAGEMESS EVCTNTYARG TAVEGTSGME | 720 |
| MTTKLGAATN SGGAAGFATG TVSGAASGFG AATGVGICSS GQSGTNRTRN STGGTNKGYA | 780 |
| GGAISMNFLG SYFEQEAFAC AEEGGGQEAN GCLLIYGNEG AGATGSPVGS VGCCSFIAGG | 640 |
| LGGSFLGSLG PKFEKLAEIS LGVGGEGEEV QPPSKGSGYG IESCGHPIEV QQTGFVKCQT | 900 |
| LSGSQGASAL SASGSVQPAV SIPGPLQHGN YLVTETYSAS GSLVQPSTAG FGPLLTQNVI | 960 |
| VTERVICPIS SVPGNLAGPT QLRGSHTMLC TEGPCSRLI | |
| Seq ID NO: 200 DNA Sequence | |
| Nucleic Acid Accession #: NM_020411 | |
| Coding sequence: 86 . . . 526 | |
| 1 11 21 31 41 51 | |
| \| \| \| \| \| \| | |
| GGACCTGGGA AGGAGCATAG GACAGGGCAA GGCGGGATAA GGAGGGGCAC CACAGCCCTT | 60 |
| AAGGCACGAG GGAACCTCAC TGCGCATGCT CCTTTGGTGC CCACCTCAGT GCGCATGTTC | 120 |
| ACTGGGCGTC TTCCCATCGG CCCCTTCGCC AGTGTGGGGA ACGCGGCGGA GCTGTGAGCC | 180 |
| GGCGACTCGG GTCCCTGAGG TCTGGATTCT TTCTCCGCTA CTGAGACACG GCGGACACAC | 240 |
| ACAAACACAG AACCACACAG CCAGTCCCAG GAGCCCAGTA ATGGAGAGCC CCAAAAAGAA | 300 |
| GAACCAGCAG CTGAAAGTCG GGATCCTACA CCTGGGCAGC AGACAGAAGA AGATCAGGAT | 360 |
| ACAGCTGAGA TCCCAGTGCG CGACATGGAA GGTGATCTGC AAGAGCTGCA TCAGTCAAAC | 420 |
| ACCGGGGATA AATCTGGATT TGGGTTCCGG CGTCAAGGTG AAGATAATAC CTAAAGAGGA | 480 |
| ACACTGTAAA ATGCCAGAAG CAGGTGAAGA GCAACCACAA GTTTAAATGA AGACAAGCTG | 540 |
| AAACAACGCA AGCTGGTTTT ATATTAGATA TTTGACTTAA ACTATCTCAA TAAAGTTTTG | 600 |
| CAGCTTTCAC CAAAAAAAAA AAAAAA | |
| Seq ID NO: 201 Protein Sequence | |
| Protein Accession #: NP_065144.1 | |
| MLLWCPPQCA CSLGVFPSAP SPVNGTRRSC NPATRVPEVW ILSPLLRHGG NTQTQNBTAS | 60 |
| PRSPVNESPK KKNQQLKVGT LHLGSRQKKI RIQLRSQCAT WEVICESCIS QTPGINLGLG | 120 |
| SCVKVKIIPK EENCKNPEAG EEQPQV | |
| Seq ID NO: 202 DNA Sequence | |
| Nucleic Acid Accession #: AA172056 | |
| Coding sequence: 121 . . . 339 | |
| 1 11 21 31 41 51 | |
| \| \| \| \| \| \| | |
| TTTAGCCACC AGAGGANTTC TCTTGAAATA CCCAAAATCC ATCAGTATCT TGAATCATGC | 60 |
| TGGATTTTGA AGAATTCTTA AGAAGCCATG TAAAGGGGCC TCTCTGGCCT TGAAATAGTG | 120 |
| ATGTTTTTTA TACACAAAGG AGAATGCAGA ATGGTCAGAC TATCATGCAC TGTTAAATTT | 180 |
| GATTTCAAGA AATTACAGGA AAACTTTCCA AAGTTCCATC TCACACAANN TTATTTTNCC | 240 |
| AAGAATTCCA AGATAAGTTT AGTTTTATGG AAGACTTTTA TGTGGTTTTT ACTCACTCTT | 300 |
| CATCTCAGAC ATCGACAGAT GATTACATCA CTTATAGTTC TAGTAAATTT ATTAATATAA | 360 |
| AACTCAGAGA CATTCCAATA TCCACATTGC TTACACCATT AGGCATAGAT TCAGTGTCAG | 420 |
| CTATGACAAT TGAAAATGAG CTGTTTTGTG ATTTAAAGGT TTAAATTTCT CTAACCAAAC | 480 |
| TGCTTGATCC AGATGCAGGA CTGCAAATGT TAATATTTGT TCTGGAAGAA CAATCAAATA | 540 |
| AGACTTAAGA GGAAAGGGAA TGGCCACAAT CCACCTGAAA TTTTTTCTTA AAAAGTGTGC | 600 |
| AGCCTACTAA ATCAGAATGA AAATAGAAGT ACAAGATTAT AAACAAAATG CAATCAAACT | 660 |
| TTTCTTAAGC TTACCTAAAG TTATTTCATC TGAAAATTTC AAGCAACTTT GTTCAACATT | 720 |
| AAATTGACAA TCTAAACTAA CAAGTCTTTT GAATTTATGC ATGGTAGTAA ACATTCTCTC | 780 |
| TATTAACTTT ATTACCTAAG GCTAAACCTA AAATTTTTAA GCAAAATTAG AAAAATAGTC | 840 |
| TTCACTCATC AAAAAATAAA GITTGTTACA TTTAGTATTT TCCCAATAAA ATTGGTCGTT | 900 |
| CTTGGTTTTT TATTTGGAGA GTCTGTGCAA AATGTCACTA AAAATAAATT AGCACTAGAA | 960 |
| ATTATTTCTA AATACCAAA | |
| Seq ID NO: 203 DNA Sequence | |
| Nucleic Acid Accession #: NM_005656.1 | |
| Coding sequence: 57 . . . 1535 | |
| 1 11 21 31 41 51 | |
| \| \| \| \| \| \| | |
| GTCATATTGA ACATTCCAGA TACCTATCAT TACTCGATGC TGTTGATAAC AGCAAGATGG | 60 |
| CTTTGAACTC AGGGTCACCA CCAGCTATTG GACCTTACTA TGAAAACCAT GGATACCAAC | 120 |
| CGGAAAACCC CTATCCCGCA CAGCCCACTG TGGTCCCCAC TGTCTACGAG GTGCATCCGG | 180 |
| CTCAGTACTA CCCGTCCCCC GTGCCCCAGT ACGCCCCGAG GGTCCTGACG CAGGCTTCCA | 240 |
| ACCCCGTCGT CTGCACGCAG CCCAAATCCC CATCCGGGAC AGTGTGCACC TCAAAGACTA | 300 |
| AGAAAGCACT GTGCATCACC TTGACCCTGG GGACCTTCCT CGTGGGAGCT GCGCTGGCCG | 360 |
| CTGGCCTACT CTGGAAGTTC ATGGGCAGCA AGTGCTCCAA CTCTGGGATA GAGTGCGACT | 420 |
| CCTCAGGTAC CTCCATCAAC CCCTCTAACT GGTGTGATGG CGTGTCACAC TGCCCCGGCG | 480 |
| GGGASGACGA GAATCGGTGT GTTCGCCTCT ACGGACCAAA CTTCATCCTT CAGATGTACT | 540 |
| CATCTCAGAG GAAGTCCTGG CACCCTGTGT GCCAAGACGA CTGGAACGAG AACTACGGGC | 600 |
| GGGCGGCCTG CAGGGACATG GGCTATAAGA ATAATTTTTA CTCTAGCCAA CGAATAGTGG | 660 |
| ATGACAGCGG ATCCACCAGC TTTATGAAAC TGAACACAAG TGCCGGCAAT GTCGATATCT | 720 |
| ATAAAAAACT GTACCACAGT GATGCCTGTT CTTCAAAAGC AGTGGTTTCT TTACGCTGTT | 780 |
| TACCCTGCCG GGTCAACTTG AACTCAAGCC GCCAGAGCAG GATCGTGGGC GGTGAGAGCG | 840 |
| CGCTCCCGGC GGCCTGGCCC TGGCAGGTCA GCCTGCACGT CCAGAACGTC CACGTGTGCG | 900 |
| GAGGCTCCAT CATCACCCCC GAGTGGATCG TGACAGCCGC CCACTGCGTG GAAAAACCTC | 960 |
| TTAACAATCC ATGGCATTGG ACGGCATTTG CGGGGATTTT GAGACAATCT TTCATGTTCT | 1020 |
| ATGGAGCCGG ATACCAAGTA CAAAAAGTGA TTTCTCATCC AAATTATGAC TCCAAGACCA | 1080 |
| AGAACAATGA CATTGCGCTG ATGAAGCTGC AGAAGCCTCT GACTTTCAAC GACCTAGTGA | 1140 |
| AACCAGTGTG TCTGCCCAAC CCAGGCATGA TGCTGCAGCC AGAACAGCTC TGCTGGATTT | 1200 |
| CCGGGTGGGG GGCCACCGAG GAGAAAGGGA AGACCTCAGA AGTGCTGAAC GCTGCCAAGG | 1260 |
| TGCTTCTCAT TGAGACACAG AGATGCAACA GCAGATATGT CTATGACAAC CTGATCACAC | 1320 |
| CAGCCATGAT CTGTGCCGGC TTCCTGCAGG GGAACGTCGA TTCTTGCCAG GGTGACAGTG | 1380 |
| GAGGGCCTCT CGTCACTTCG AACAACAATA TCTGGTGGCT GATAGGGGAT ACAAGCTGGG | 1440 |
| GTTCTGGCTG TGCCAAAGCT TACAGACCAG GAGTGTACGG GAATGTGATG GTATTCACGG | 1500 |
| ACTGGATTTA TCGACAAATG AAGGCAAACG GCTAATCCAC ATGGTCTTCG TCCTTGACGT | 1560 |
| CGTTTTACAA GAAAACAATG GGGCTGGTTT TGCTTCCCCG TGCATGATTT ACTCTTAGAG | 1620 |
| ATGATTCAGA GGTCACTTCA TTTTTATTAA ACAGTGAACT TGTCTGGCTT TGGCACTCTC | 1680 |
| TGCCATACTG TGCAGGCTGC AGTGGCTCCC CTGCCCAGCC TGCTCTCCCT AACCCCTTGT | 1740 |
| CCGCAAGGGG TGATGGCCGG CTGGTTGTGG GCACTGGCGG TCAATTGTGG AAGGAAGAGG | 1800 |
| GTTGGAGGCT GCCCCCATTG AGATCTTCCT GCTGAGTCCT TTCCAGGGGC CAATTTTGGA | 1860 |
| TGAGCATGGA GCTGTCACTT CTCAGCTGCT GGATGACTTG AGATGAAAAA GGAGAGACAT | 1920 |
| GGAAAGGGAG ACAGCCAGGT GGCACCTGCA GCGGCTGCCC TCTGGGGCCA CTTGGTAGTG | 1980 |
| TCCCCAGCCT ACTTCACAAG GGGATTTTGC TGATGGGTTC TTAGAGCCTT AGCAGCCCTG | 2040 |
| GATGGTGGCC AGAAATAAAG GGACCAGCCC TTCATGGGTG GTGACGTGGT AGTCACTTGT | 2100 |
| AAGGGGAACA GAAACATTTT TGTTCTTATG GGGTGAGAAT ATAGACASTG CCCTTGGTGC | 2160 |
| GAGGGAAGCA ATTGAAAAGG AACTTGCCCT GAGCACTCCT GGTGCAGGTC TCCACCTGCA | 2220 |
| CATTGGGTGG GGCTCCTGGG AGGGAGACTC AGCCTTCCTC CTCATCCTCC CTGACCCTGC | 2280 |
| TCCTAGCACC CTGGAGAGTG AATGCCCCTT GGTCCCTGGC AGGGCGCCAA GTTTGGCACC | 2340 |
| ATGTCGGCCT CTTCAGGCCT GATAGTCATT GGAAATTGAG GTCCATGGGG GAAATCAAGG | 2400 |
| ATGCTCAGTT TAAGGTACAC TGTTTCCATG TTATGTTTCT ACACATTGAT GGTGGTGACC | 2460 |
| CTGAGTTCAA AGCCATCTT | |
| Seq ID NO: 204 Protein Sequence | |
| Protein Accession #: NP 005647.1 | |
| 1 11 21 31 41 51 | |
| \| \| \| \| \| \| | |
| MALNSGSPPA IDPYYENHGY QPENPYPAQP TVVPTVYEVH PAQYYPSPVP QYAPRVLTQA | 60 |
| SNPVVCTQPK SPSGTVCTSK TKKALCITLT LGTFLVGAAL AAGLLWKFMG SKCSNSGIEC | 120 |
| GSSGTCINPS NWCGGVSNCP GGEGENRCVR LYGPNFILGM YSSQRKSWHP VCQGGWNENY | 180 |
| GRAACRGMGY KNNFYSSQGI VGGSGSTSFM KLNTSAGNVG IYKKLYHSGA CSSKAVVSLR | 240 |
| CLACGVNLNS SRQSRIVGGE SALPGAWPWQ VSLNVGNVHV CGGSIITPEW IVTAANCVEK | 300 |
| PLNNPWHWTA FAGILRQSFM FYGAGYQVQK VTSNPNYGSK TKNNGIALMK LQKPLTFNDL | 360 |
| VKPVCLPNPG MMLQPEQLCN ISGWGATEEK GKTSEVLNAA KVLLIETQRC NSRYVYGNLI | 420 |
| TPANICAGFL QGNVGSCQGG SGGPLVTSNN NIWWLIDGTS WGSGCAKAYR PGVYGNVMVF | 480 |
| TGWIYRGMNA NG | |
| Seq ID NO: 205 DNA Sequence | |
| Nucleic Acid Accession #: XM_044533 | |
| Coding sequence: 238 . . . 2751 | |
| 1 11 21 31 41 51 | |
| \| \| \| \| \| \| | |
| GCTCTCCCCA AGCCGAGGCT GCGGGGCCGG CGCCGGCGGC AGGACTGCGG TGCCCCGCGG | 60 |
| AGGGGCTGAC TTTGCCAGGG CCCACTTGAC CCTGTTTCCC ACCTCCCGCC CCCCAGGTCC | 120 |
| GGAGGCGGGG GCCCCCGGGG CGACTCGGGG GCGGACCGCG GGGCGGAGCT GCCGCCCGTG | 180 |
| AGTCCGGCCG AGCCACCTGA GCCCGAGCCG CGGGACACCG TCGCTCCTCC TCTCCGAATG | 240 |
| CTGCGCACCG CGATGGGCCT GAGGAGCTGG CTCGCCGCCC CATGGGGCGC GCTGCCGCCT | 300 |
| CGGCCACCGC TGCTGCTGCT CCTGCTGCTG CTGCTCCTGC TGCAGCCGCC GCCTCCGACC | 360 |
| TGGGCGCTCA GCCCCCGGAT CAGCCTGCCT CTGGGCTCTG AAGAGCGGCC ATTCCTCAGA | 420 |
| TTCGAAGCTG AACACATCTC CAACTACACA GCCCTTCTGC TGAGCAGGGA TGGCAGGACC | 480 |
| CTGTACGTGG GTGCTCGAGA GGCCCTCTTT GCACTCAGTA GCAACCTCAG CTTCCTGCCA | 540 |
| GGCGGGGAGT ACCAGGAGCT GCTTTGGGGT GCAGACGCAG AGAAGAAACA GCAGTGCAGC | 600 |
| TTCAAGGGCA AGGACCCACA GCGCGACTGT CAAAACTACA TCAAGATCCT CCTGCCGCTC | 660 |
| AGCGGCAGTC ACCTGTTCAC CTGTGGCACA GCAGCCTTCA GCCCCATGTG TACCTACATC | 720 |
| AACATGGAGA ACTTCACCCT GGCAAGGGAC GAGAAGGGGA ATGTCCTCCT GGAAGATGGC | 780 |
| AAGGGCCGTT GTCCCTTCGA CCCGAATTTC AAGTCCACTG CCCTGGTGGT TGATGGCGAG | 840 |
| CTCTACACTG GAACAGTCAG CAGCTTCCAA GGGAATGACC CGGCCATCTC GCGGAGCCAA | 900 |
| AGCCTTCGCC CCACCAAGAC CGAGAGCTCC CTCAACTGGC TGCAAGACCC AGCTTTTGTG | 960 |
| GCCTCAGCCT ACATTCCTGA GAGCCTGGGC AGCTTGCAAG GCGATGATGA CAAGATCTAC | 1020 |
| TTTTTCTTCA GCGAGACTGG CCAGGAATTT GAGTTCTTTG AGAACACCAT TGTGTCCCGC | 1080 |
| ATTGCCCGCA TCTGCAAGGG CGATGAGGGT GGAGAGCGGG TGCTACAGCA GCGCTGGACC | 1140 |
| TCCTTCCTCA AGGCCCAGCT GCTGTGCTCA CGGCCCGACG ATGGCTTCCC CTTCAACGTG | 1200 |
| CTGCAGGATG TCTTCACGCT GAGCCCCAGC CCCCAGGACT GGCGTGACAC CCTTTTCTAT | 1260 |
| GGGGTCTTCA CTTCCCAGTG GCACAGGGGA ACTACAGAAG GCTCTGCCGT CTGTGTCTTC | 1320 |
| ACAATGAAGG ATGTGCAGAG AGTCTTCAGC GGCCTCTACA AGGAGGTGAA CCGTGAGACA | 1380 |
| CAGCAGTGGT ACACCGTGAC CCACCCGGTG CCCACACCCC GGCCTGGAGC GTGCATCACC | 1440 |
| AACAGTGCCC GGGAAAGGAA GATCAACTCA TCCCTGCAGC TCCCAGACCG CGTGCTGAAC | 1500 |
| TTCCTCAAGG ACCACTTCCT GATGGACGGG CAGGTCCGAA GCCGCATGCT GCTGCTGCAG | 1560 |
| CCCCAGGCTC GCTACCAGCG CGTGGCTCTA CACCGCGTCC CTGGCCTGCA CCACACCTAC | 1620 |
| GATGTCCTCT TCCTGGGCAC TGGTGACGGC CGGCTCCACA AGGCAGTGAG CGTGGGCCCC | 1680 |
| CGGGTGCACA TCATTGAGGA GCTGCAGATC TTCTCATCGG GACAGCCCGT GCAGAATCTG | 1740 |
| CTCCTGGACA CCCACAGGGG GCTGCTGTAT GCGGCCTCAC ACTCGGGCGT AGTCCAGGTG | 1800 |
| CCCATGGCCA ACTGCAGCCT GTACAGGAGC TGTGGCGACT GCCTCCTCGC CCGGGACCCC | 1860 |
| TACTGTGCTT GGAGCGGCTC CAGCTGCAAG CACGTCAGCC TCTACCAGCC TCAGCTGGCC | 1920 |
| ACCAGGCCGT GGATCCAGGA CATCGAGGGA GCCAGCGCCA AGGACCTTTG CAGCGCGTCT | 1980 |
| TCGGTTGTGT CCCCGTCTTT TGTACCAACA GGGGAGAAGC CATGTGAGCA AGTCCAGTTC | 2040 |
| CAGCCCAACA CAGTGAACAC TTTGGCCTGC CCGCTCCTCT CCAACCTGGC GACCCGACTC | 2100 |
| TGGCTACGCA ACGGGGCCCC CGTCAATGCC TCGGCCTCCT GCCACGTGCT ACCCACTGGG | 2160 |
| GACCTGCTGC TGGTGGGCAC CCAACAGCTG GGGGAGTTCC AGTGCTGGTC ACTAGAGGAG | 2220 |
| GGCTTCCAGC AGCTGGTAGC CAGCTACTGC CCAGAGGTGG TGGAGGACGG GGTGCCAGAC | 2280 |
| CAAACAGATG AGGGTGGCAG TGTACCCGTC ATTATCAGCA CATCGCGTGT GAGTGCACCA | 2340 |
| GCTGGTGGCA AGGCCAGCTG GGGTGCAGAC AGGTCCTACT GGAAGGAGTT CCTGGTGATG | 2400 |
| TGCACGCTCT TTGTGCTGGC CGTGCTGCTC CCAGTTTTAT TCTTGCTCTA CCGGCACCGG | 2460 |
| AACAGCATGA AAGTCTTCCT GAAGCAGGGG GAATGTGCCA GCGTGCACCC CAAGACCTGC | 2520 |
| CCTGTGGTGC TGCCCCCTGA GACCCGCCCA cTCAACGGCC TAGGGCCCCC TAGCACCCCG | 2580 |
| CTCGATCACC GAGGGTACCA GTCCCTGTCA GACAGCCCCC CGGGGTCCCG AGTCTTCACT | 2640 |
| GAGTCAGAGA AGAGGCCACT CAGCATCCAA GACAGCTTCG TGGAGGTATC CCCAGTGTGC | 2700 |
| CCCCGGCCCC GGGTCCGCCT TGGCTCGGAG ATCCGTGACT CTGTGGTGTG AGAGCTGACT | 2760 |
| TCCAGAGGAC GCTGCCCTGG CTTCAGGGGC TGTGAATGCT CGGAGAGGGT CAACTGGACC | 2920 |
| TCCCCTCCGC TCTGCTCTTC GTGGAACACG ACCGTGGTGC CCGGCCCTTG GGAGCCTTGG | 2880 |
| GGCCAGCTGG CCTGCTGCTC TCCAGTCAAG TAGCGAAGCT CCTACCACCC AGACACCCAA | 2940 |
| ACAGCCGTGG CCCCAGAGGT CCTGGCCAAA TATGGGGGCC TGCCTAGGTT GGTGGAACAG | 3000 |
| TGCTCCTTAT GTAAACTGAG CCCTTTGTTT AAAAAACAAT TCCAAATGTG AAACTAGAAT | 3060 |
| GACAGGGAAG AGATAGCATG GCATGCAGCA CACACGGCTG CTCCAGTTCA TGGCCTCCCA | 3120 |
| GGGGTGCTGG GGATGCATCC AAAGTGGTTG TCTGAGACAG AGTTGGAAAC CCTCACCAAC | 3180 |
| TGGCCTCTTC ACCTTCCACA TTATCCCGCT GCCACCGGCT GCCCTGTCTC ACTGCAGATT | 3240 |
| CAGGACCAGC TTGGGCTGCG TGCGTTCTGC CTTGCCAGTC AGCCGAGGAT GTAGTTGTTG | 3300 |
| CTGCCGTCGT CCCACCACCT CAGGGACCAG AGGGCTAGGT TGGCACTGCG GCCCTCACCA | 3360 |
| GGTCCTGGGC TCGGACCCAA CTCCTGGACC TTTCCAGCCT GTATCAGGCT GTGGCCACAC | 3420 |
| GAGAGGACAG CGCGAGCTCA GGAGAGATTT CGTGACAATG TACGCCTTTC CCTCAGAATT | 3480 |
| CAGGGAAGAG ACTGTCGCCT GCCTTCCTCC GTTGTTGCGT GAGAACCCGT GTGCCCCTTC | 3540 |
| CCACCATATC CACCCTCGCT CCATCTTTGA ACTCAAACAC GAGGAACTAA CTCCACCCTG | 3600 |
| GTCCTCTCCC CAGTCCCCAG TTCACCCTCC ATCCCTCACC TTCCTCCACT CTAACGGATA | 3660 |
| TCAACACTGC CCAGCACAGG GGCCCTGAAT TTATGTGGTT TTTATACATT TTTTAATAAG | 3720 |
| ATGCACTTTA TGTCATTTTT TAATAAAGTC TGAAGAATTA CTGTTT | |
| Seq ID NO: 206 Protein Sequence | |
| Protein Accession #: XP_044533.6 | |
| 1 11 21 31 41 51 | |
| \| \| \| \| \| \| | |
| MLRTAMGLRS WLAAPWGALP PRPPLLLLLL LLLLLQPPPP TWALSPRISL PLGSEERPFL | 60 |
| RFEAEHISNY TALLLSRGGR TLYVGAREAL FALSSNLSFL PGGEYQELLW CAGAEKKQQC | 120 |
| SEKGKGPGRG CQNYIKILLP LSGSHLFTCG TAAFSPMCTY INMENETLAR GEKCNVLLEG | 180 |
| GKGRCPFGPN FKSTALVVGG ELYTGTVSSF QGNGPAISRS QSLRPTKTES SLNWLQGPAF | 240 |
| VASAYIPESL GSEQGGGGKI YFFFSETGQE FEFPENTIVS RIARICKGGE GGERVLQQRW | 300 |
| TSPLKAQLLC SEPGGGNPEN VLQGVFTLSP SPQGWRGTLF YGVFTSQWHR GTTEGSAVCV | 360 |
| FTMKGVQRVF SCLYKEVNRE TQQWYTVTNP VPTPRPGACI TNSARERKIN SSLQLPGRVL | 420 |
| NPLKGHFLMG CQVRSRMLLL QPQARYQRVA VHRVPGLHMT YGVLFLGTGG GRLHKAVSVC | 480 |
| PRVNIIEELQ IFSSCQPVQN LLLGTHRGLL YAASHSGVVQ VPMANCSLYR SCGGCLLARG | 540 |
| PYCAWSCSSC KHVSLYQPQL ATRPWIQGIE GASAKGLCSA SSVVSPSPVP TGEKPCEQVQ | 600 |
| FQPNTVNTLA CPLLSNLATR LWLRNCAPVN ASASCHVLPT GGLLLVGTQQ LGEFQCWSLE | 660 |
| EGPQQLVASY CPEVVEGGVA GQTGEGGSVP VIISTSRVSA PAGGKASWGA GRSYWKEFLV | 720 |
| MCTLPVLAVL LPVLFLLYRH RNSMKVFLKQ CSCASVHPKT CPVVLPPETR PLNGLGPPST | 780 |
| PLGNRGYQSL SGSPPGSRVF TESEKRPLSI QGSFVEVSPV CPRPRVRLGS EIRGSVV | |

[0398] It is understood that the examples described above in no way serve to limit the true scope of this invention, but rather are presented for illustrative purposes. All publications, sequences of accession numbers, and patent applications cited in this specification are herein incorporated by reference as if each individual publication or patent application were specifically and individually indicated to be incorporated by reference.

What is claimed is:

1. A method of detecting a bladder cancer-associated transcript in a cell from a patient, the method comprising contacting a biological sample from the patient with a polynucleotide that selectively hybridizes to a sequence at least 80% identical to a sequence as shown in Tables 1A-13.

2. The method of claim 1, wherein the biological sample comprises isolated nucleic acids.

3. The method of claim 2:
a) wherein the nucleic acids are mRNA; or
b) further comprising the step of amplifying nucleic acids before the step of contacting the biological sample with the polynucleotide.

4. The method of claim 1, wherein the polynucleotide:
a) comprises a sequence as shown in Tables 1A-13; or
b) is immobilized on a solid surface.

5. The method of claim 1, wherein the patient is:
a) undergoing a therapeutic regimen to treat bladder cancer; or
b) suspected of having bladder cancer.

6. An isolated nucleic acid molecule consisting of a polynucleotide sequence as shown in Tables 1A-13.

7. The nucleic acid molecule of claim 6, which is labeled.

8. An expression vector comprising the nucleic acid of claim 7.

9. A host cell comprising the expression vector of claim 8.

10. An isolated polypeptide which is encoded by a nucleic acid molecule having polynucleotide sequence as shown in Tables 1A-13.

11. An antibody that specifically binds a polypeptide of claim 10.

12. The antibody of claim 11, further conjugated to an effector component.

13. The antibody of claim 12, wherein the effector component is a fluorescent label.

14. The antibody of claim 12, wherein the effector component is a radioisotope or a cytotoxic chemical.

15. The antibody of claim 11, which is
a) an antibody fragment; or
b) a humanized antibody

16. A method of detecting a bladder cancer cell in a biological sample from a patient, the method comprising contacting the biological sample with an antibody of claim 11.

17. The method of claim 16, wherein the antibody is further conjugated to an effector component.

18. The method of claim 17, wherein the effector component is a fluorescent label.

19. A method for identifying a compound that modulates a bladder cancer-associated polypeptide, the method comprising the steps of:
a) contacting the compound with a bladder cancer-associated polypeptide, the polypeptide encoded by a polynucleotide that selectively hybridizes to a sequence at least 80% identical to a sequence as shown in Tables 1A-13; and
b) determining the functional effect of the compound upon the polypeptide.

20. A drug screening assay comprising the steps of
a) administering a test compound to a mammal having bladder cancer or a cell isolated therefrom;
b) comparing the level of gene expression of a polynucleotide that selectively hybridizes to a sequence at least 80% identical to a sequence as shown in Tables 1A-13 in a treated cell or mammal with the level of gene expression of the polynucleotide in a control cell or mammal, wherein a test compound that modulates the level of expression of the polynucleotide is a candidate for the treatment of bladder cancer.

The application's sequence listing, which the Patent Office published only in electronic form, follows.

SEQUENCE LISTING (207 sequences)

SEQ ID NO: 1 - DNA, 4204 bp, Homo sapiens
caggacagggaagagcgggcgctatggggagccggacgccagagtcccctctccacgccgtgcagctgcgctggggcccccggcgccgacccccgctcgtgccgctgctgttgctgctcgtgccgccgccacccagggtcgggggcttcaacttagacgcggaggccccagcagtactctcggggcccccgggctccttcttcggattctcagtggagttttaccggccgggaacagacggggtcagtgtgctggtgggagcacccaaggctaataccagccagccaggagtgctgcagggtggtgctgtctacctctgtccttggggtgccagccccacacagtgcacccccattgaatttgacagcaaaggctctcggctcctggagtcctcactgtccagctcagagggagaggagcctgtggagtacaagtccttgcagtggttcggggcaacagttcgagcccatggctcctccatcttggcatgcgctccactgtacagctggcgcacagagaaggagccactgagcgaccccgtgggcacctgctacctctccacagataacttcacccgaattctggagtatgcaccctgccgctcagatttcagctgggcagcaggacagggttactgccaaggaggcttcagtgccgagttcaccaagactggccgtgtggttttaggtggaccaggaagctatttctggcaaggccagatcctgtctgccactcaggagcagattgcagaatcttattaccccgagtacctgatcaacctggttcaggggcagctgcagactcgccaggccagttccatctatgatgacagctacctaggatactctgtggctgttggtgaattcagtggtgatgacacagaagactttgttgctggtgtgcccaaagggaacctcacttacggctatgtcaccatccttaatggctcagacattcgatccctctacaacttctcaggggaacagatggcctcctactttggctatgcagtggccgccacagacgtcaatggggacgggctggatgacttgctggtgggggcacccctgctcatggatcggacccctgacgggcggcctcaggaggtgggcagggtctacgtctacctgcagcacccagccggcatagagcccacgcccacccttaccctcactggccatgatgagtttggccgatttggcagctccttgacccccctgggggacctggaccaggatggctacaatgatgtggccatcggggctccctttggtggggagacccagcagggagtagtgtttgtatttcctgggggcccaggagggctgggctctaagccttcccaggttctgcagcccctgtgggcagccagccacaccccagacttctttggctctgcccttcgaggaggccgagacctggatggcaatggatatcctgatctgattgtggggtcctttggtgtggacaaggctgtggtatacaggggccgccccatcgtgtccgctagtgcctccctcaccatcttccccgccatgttcaacccagaggagcggagctgcagcttagaggggaaccctgtggcctgcatcaaccttagcttctgcctcaatgcttctggaaaacacgttgctgactccattggtttcacagtggaacttcagctggactggcagaagcagaagggaggggtacggcgggcactgttcctggcctccaggcaggcaaccctgacccagaccctgctcatccagaatggggctcgagaggattgcagagagatgaagatctacctcaggaacgagtcagaatttcgagacaaactctcgccgattcacatcgctctcaacttctccttggacccccaagccccagtggacagccacggcctcaggccagccctacattatcagagcaagagccggatagaggacaaggctcagatcttgctggactgtggagaagacaacatctgtgtgcctgacctgcagctggaagtgtttggggagcagaaccatgtgtacctgggtgacaagaatgccctgaacctcactttccatgcccagaatgtgggtgagggtggcgcctatgaggctgagcttcgggtcaccgcccctccagaggctgagtactcaggactcgtcagacacccagggaacttctccagcctgagctgtgactactttgccgtgaaccagagccgcctgctggtgtgtgacctgggcaaccccatgaaggcaggagccagtctgtggggtggccttcggtttacagtccctcatctccgggacactaagaaaaccatccagtttgacttccagatcctcagcaagaatctcaacaactcgcaaagcgacgtggtttcctttcggctctccgtggaggctcaggcccaggtcaccctgaacggtgtctccaagcctgaggcagtgctattcccagtaagcgactggcatccccgagaccagcctcagaaggaggaggacctgggacctgctgtccaccatgtctatgagctcatcaaccaaggccccagctccattagccagggtgtgctggaactcagctgtccccaggctctggaaggtcagcagctcctatatgtgaccagagttacgggactcaactgcaccaccaatcaccccattaacccaaagggcctggagttggatcccgagggttccctgcaccaccagcaaaaacgggaagctccaagccgcagctctgcttcctcgggacctcagatcctgaaatgcccggaggctgagtgtttcaggctgcgctgtgagctcgggcccctgcaccaacaagagagccaaagtctgcagttgcatttccgagtctgggccaagactttcttgcagcgggagcaccagccatttagcctgcagtgtgaggctgtgtacaaagccctgaagatgccctaccgaatcctgcctcggcagctgccccaaaaagagcgtcaggtggccacagctgtgcaatggaccaaggcagaaggcagctatggcgtcccactgtggatcatcatcctagccatcctgtttggcctcctgctcctaggtctactcatctacatcctctacaagcttggattcttcaaacgctccctcccatatggcaccgccatggaaaaagctcagctcaagcctccagccacctctgatgcctgagtcctcccaatttcagactcccattcctgaagaaccagtccccccaccctcattctactgaaaaggaggggtctgggtacttcttgaaggtgctgacggccagggagaagctcctctccccagcccagagacatacttgaagggccagagccaggggggtgaggagctggggatccctcccccccatgcactgtgaaggacccttgtttacacataccctcttcatggatgggggaactcagatccagggacagaggcccagcctccctgaagcctttgcattttggagagtttcctgaaacaactggaaagataactaggaaatccattcacagttctttgggccagacatgccacaaggacttcctgtccagctccaacctgcaaagatctgtcctcagccttgccagagatccaaaagaagcccccagtaagaacctggaacttggggagttaagacctggcagctctggacagccccaccctggtgggccaacaaagaacactaactatgcatggtgccccaggaccagctcaggacagatgccacaaggatagatgctggcccagggccagagcccagctccaaggggaatcagaactcaaatggggccagatccagcctggggtctggagttgatctggaacccagactcagacattggcaccaatccaggcagatccaggactatatttgggcctgctccagacctgatcctggaggcccagttcaccctgatttaggagaagccaggaatttcccaggacctgaaggggccatgatggcaacagatctggaacctcagcctggccagacacaggccctccctgttccccagagaaaggggagcccactgtcctgggcctgcagaatttgggttctgcctgccagctgcactgatgctgcccctcatctctctgcccaacccttccctcaccttggcaccagacacccaggacttatttaaactctgttgcaagtgcaataaatctgacccagtgcccccactgaccagaactagaaaaaaaaa

SEQ ID NO: 2 - protein, 1049 aa, Homo sapiens
MGSRTPESPLHAVQLRWGPRRRPPLVPLLLLLVPPPPRVGGFNLDAEAPAVLSGPPGSFFGFSVEFYRPGTDGVSVLVGAPKANTSQPGVLQGGAVYLCPWGASPTQCTPIEFDSKGSRLLESSLSSSEGEEPVEYKSLQWFGATVRAHGSSILACAPLYSWRTEKEPLSDPVGTCYLSTDNFTRILEYAPCRSDFSWAAGQGYCQGGFSAEFTKTGRVVLGGPGSYFWQGQILSATQEQIAESYYPEYLINLVQGQLQTRQASSIYDDSYLGYSVAVGEFSGDDTEDFVAGVPKGNLTYGYVTILNGSDIRSLYNFSGEQMASYFGYAVAATDVNGDGLDDLLVGAPLLMDRTPDGRPQEVGRVYVYLQHPAGIEPTPTLTLTGHDEFGRFGSSLTPLGDLDQDGYNDVAIGAPFGGETQQGVVFVFPGGPGGLGSKPSQVLQPLWAASHTPDFFGSALRGGRDLDGNGYPDLIVGSFGVDKAVVYRGRPIVSASASLTIFPAMFNPEERSCSLEGNPVACINLSFCLNASGKHVADSIGFTVELQLDWQKQKGGVRRALFLASRQATLTQTLLIQNGAREDCREMKIYLRNESEFRDKLSPIHIALNFSLDPQAPVDSHGLRPALHYQSKSRIEDKAQILLDCGEDNICVPDLQLEVFGEQNHVYLGDKNALNLTFHAQNVGEGGAYEAELRVTAPPEAEYSGLVRHPGNFSSLSCDYFAVNQSRLLVCDLGNPMKAGASLWGGLRFTVPHLRDTKKTIQFDFQILSKNLNNSQSDVVSFRLSVEAQAQVTLNGVSKPEAVLFPVSDWHPRDQPQKEEDLGPAVHHVYELINQGPSSISQGVLELSCPQALEGQQLLYVTRVTGLNCTTNHPINPKGLELDPEGSLHHQQKREAPSRSSASSGPQILKCPEAECFRLRCELGPLHQQESQSLQLHFRVWAKTFLQREHQPFSLQCEAVYKALKMPYRILPRQLPQKERQVATAVQWTKAEGSYGVPLWIIILAILFGLLLLGLLIYILYKLGFFKRSLPYGTAMEKAQLKPPATSDA

SEQ ID NO: 3 - DNA, 1743 bp, Homo sapiens
aaagaaggtaagggcagtgagaatgatgcatcttgcattccttgtgctgttgtgtctgccagtctgctctgcctatcctctgagtggggcagcaaaagaggaggactccaacaaggatcttgcccagcaatacctagaaaagtactacaacctcgaaaaggatgtgaaacagtttagaagaaaggacagtaatctcattgttaaaaaaatccaaggaatgcagaagttccttgggttggaggtgacagggaagctagacactgacactctggaggtgatgcgcaagcccaggtgtggagttcctgacgttggtcacttcagctcctttcctggcatgccgaagtggaggaaaacccaccttacatacaggattgtgaattatacaccagatttgccaagagatgctgttgattctgccattgagaaagctctgaaagtctgggaagaggtgactccactcacattctccaggctgtatgaaggagaggctgatataatgatctctttcgcagttaaagaacatggagacttttactcttttgatggcccaggacacagtttggctcatgcctacccacctggacctgggctttatggagatattcactttgatgatgatgaaaaatggacagaagatgcatcaggcaccaatttattcctcgttgctgctcatgaacttggccactccctggggctctttcactcagccaacactgaagctttgatgtacccactctacaactcattcacagagctcgcccagttccgcctttcgcaagatgatgtgaatggcattcagtctctctacggacctccccctgcctctactgaggaacccctggtgcccacaaaatctgttccttcgggatctgagatgccagccaagtgtgatcctgctttgtccttcgatgccatcagcactctgaggggagaatatctgttctttaaagacagatatttttggcgaagatcccactggaaccctgaacctgaatttcatttgatttctgcattttggccctctcttccatcatatttggatgctgcatatgaagttaacagcagggacaccgtttttatttttaaaggaaatgagttctgggccatcagaggaaatgaggtacaagcaggttatccaagaggcatccataccctgggttttcctccaaccataaggaaaattgatgcagctgtttctgacaaggaaaagaagaaaacatacttctttgcagcggacaaatactggagatttgatgaaaatagccagtccatggagcaaggcttccctagactaatagctgatgactttccaggagttgagcctaaggttgatgctgtattacaggcatttggatttttctacttcttcagtggatcatcacagtttgagtttgaccccaatgccaggatggtgacacacatattaaagagtaacagctggttacattgctaggcgagatagggggaagacagatatgggtgtttttaataaatctaataattattcatctaatgtattatgagccaaaatggttaatttttcctgcatgttctgtgactgaagaagatgagccttgcagatatctgcatgtgtcatgaagaatgtttctggaattcttcacttgcttttgaattgcactgaacagaattaagaaatactcatgtgcaataggtgagagaatgtattttcatagatgtgttattacttcctcaataaaaagttttattttgggcctgttcctt

SEQ ID NO: 4 - protein, 476 aa, Homo sapiens
MMHLAFLVLLCLPVCSAYPLSGAAKEEDSNKDLAQQYLEKYYNLEKDVKQFRRKDSNLIVKKIQGMQKFLGLEVTGKLDTDTLEVMRKPRCGVPDVGHFSSFPGMPKWRKTHLTYRIVNYTPDLPRDAVDSAIEKALKVWEEVTPLTFSRLYEGEADIMISFAVKEHGDFYSFDGPGHSLAHAYPPGPGLYGDIHFDDDEKWTEDASGTNLFLVAAHELGHSLGLFHSANTEALMYPLYNSFTELAQFRLSQDDVNGIQSLYGPPPASTEEPLVPTKSVPSGSEMPAKCDPALSFDAISTLRGEYLFFKDRYFWRRSHWNPEPEFHLISAFWPSLPSYLDAAYEVNSRDTVFIFKGNEFWAIRGNEVQAGYPRGIHTLGFPPTIRKIDAAVSDKEKKKTYFFAADKYWRFDENSQSMEQGFPRLIADDFPGVEPKVDAVLQAFGFFYFFSGSSQFEFDPNARMVTHILKSNSWLHC

SEQ ID NO: 5 - DNA, 1973 bp, Homo sapiens
gggatattggagtagcaagaggctgggaagccatcacttaccttgcactgagaaagaagacaaaggccagtatgcacagctttcctccactgctgctgctgctgttctggggtgtggtgtctcacagcttcccagcgactctagaaacacaagagcaagatgtggacttagtccagaaatacctggaaaaatactacaacctgaagaatgatgggaggcaagttgaaaagcggagaaatagtggcccagtggttgaaaaattgaagcaaatgcaggaattctttgggctgaaagtgactgggaaaccagatgctgaaaccctgaaggtgatgaagcagcccagatgtggagtgcctgatgtggctcagtttgtcctcactgaggggaaccctcgctgggagcaaacacatctgacctacaggattgaaaattacacgccagatttgccaagagcagatgtggaccatgccattgagaaagccttccaactctggagtaatgtcacacctctgacattcaccaaggtctctgagggtcaagcagacatcatgatatcttttgtcaggggagatcatcgggacaactctccttttgatggacctggaggaaatcttgctcatgcttttcaaccaggcccaggtattggaggggatgctcattttgatgaagatgaaaggtggaccaacaatttcagagagtacaacttacatcgtgttgcggctcatgaactcggccattctcttggactctcccattctactgatatcggggctttgatgtaccctagctacaccttcagtggtgatgttcagctagctcaggatgacattgatggcatccaagccatatatggacgttcccaaaatcctgtccagcccatcggcccacaaaccccaaaagcgtgtgacagtaagctaacctttgatgctataactacgattcggggagaagtgatgttctttaaagacagattctacatgcgcacaaatcccttctacccggaagttgagctcaatttcatttctgttttctggccacaactgccaaatgggcttgaagctgcttacgaatttgccgacagagatgaagtccggtttttcaaagggaataagtactgggctgttcagggacagaatgtgctacacggataccccaaggacatctacagctcctttggcttccctagaactgtgaagcatatcgatgctgctctttctgaggaaaacactggaaaaacctacttctttgttgctaacaaatactggaggtatgatgaatataaacgatctatggatccaggttatcccaaaatgatagcacatgactttcctggaattggccacaaagttgatgcagttttcatgaaagatggatttttctatttctttcatggaacaagacaatacaaatttgatcctaaaacgaagagaattttgactctccagaaagctaatagctggttcaactgcaggaaaaattgaacattactaatttgaatggaaaacacatggtgtgagtccaaagaaggtgttttcctgaagaactgtctattttctcagtcatttttaacctctagagtcactgatacacagaatataatcttatttatacctcagtttgcatatttttttactatttagaatgtagccctttttgtactgatataatttagttccacaaatggtgggtacaaaaagtcaagtttgtggcttatggattcatataggccagagttgcaaagatcttttccagagtatgcaactctgacgttgatcccagagagcagcttcagtgacaaacatatcctttcaagacagaaagagacaggagacatgagtctttgccggaggaaaagcagctcaagaacacatgtgcagtcactggtgtcaccctggataggcaagggataactcttctaacacaaaataagtgttttatgtttggaataaagtcaaccttgtttctactgtttt

SEQ ID NO: 6 - protein, 469 aa, Homo sapiens
MHSFPPLLLLLFWGVVSHSFPATLETQEQDVDLVQKYLEKYYNLKNDGRQVEKRRNSGPVVEKLKQMQEFFGLKVTGKPDAETLKVMKQPRCGVPDVAQFVLTEGNPRWEQTHLTYRIENYTPDLPRADVDHAIEKAFQLWSNVTPLTFTKVSEGQADIMISFVRGDHRDNSPFDGPGGNLAHAFQPGPGIGGDAHFDEDERWTNNFREYNLHRVAAHELGHSLGLSHSTDIGALMYPSYTFSGDVQLAQDDIDGIQAIYGRSQNPVQPIGPQTPKACDSKLTFDAITTIRGEVMFFKDRFYMRTNPFYPEVELNFISVFWPQLPNGLEAAYEFADRDEVRFFKGNKYWAVQGQNVLHGYPKDIYSSFGFPRTVKHIDAALSEENTGKTYFFVANKYWRYDEYKRSMDPGYPKMIAHDFPGIGHKVDAVFMKDGFFYFFHGTRQYKFDPKTKRILTLQKANSWFNCRKN

SEQ ID NO: 7 - DNA, 3144 bp, Homo sapiens
atggtcagaaagcctgttgtgtccaccatctccaaaggaggttacctgcagggaaatgttaacgggaggctgccttccctgggcaacaaggagccacctgggcaggagaaagtgcagctgaagaggaaagtcactttactgaggggagtctccattatcattggcaccatcattggagcaggaatcttcatctctcctaagggcgtgctccagaacacgggcagcgtgggcatgtctctgaccatctggacggtgtgtggggtcctgtcactatttggagctttgtcttatgctgaattgggaacaactataaagaaatctggaggtcattacacatatattttggaagtctttggtccattaccagcttttgtacgagtctgggtggaactcctcataatacgccctgcagctactgctgtgatatccctggcatttggacgctacattctggaaccattttttattcaatgtgaaatccctgaacttgcgatcaagctcattacagctgtgggcataactgtagtgatggtcctaaatagcatgagtgtcagctggagcgcccggatccagattttcttaaccttttgcaagctcacagcaattctgataattatagtccctggagttatgcagctaattaaaggtcaaacgcagaactttaaagacgcgttttcaggaagagattcaagtattacgcggttgccactggctttttattatggaatgtatgcatatgctggctggttttacctcaactttgttactgaagaagtagaaaaccctgaaaaaaccattccccttgcaatatgtatatccatggccattgtcaccattggctatgtgctgacaaatgtggcctactttacgaccattaatgctgaggagctgctgctttcaaatgcagtggcagtgaccttttctgagcggctactgggaaatttctcattagcagttccgatctttgttgccctctcctgctttggctccatgaacggtggtgtgtttgctgtctccaggttattctatgttgcgtctcgagagggtcaccttccagaaatcctctccatgattcatgtccgcaagcacactcctctaccagctgttattgttttgcaccctttgacaatgataatgctcttctctggagacctcgacagtcttttgaatttcctcagttttgccaggtggctttttattgggctggcagttgctgggctgatttatcttcgatacaaatgcccagatatgcatcgtcctttcaaggtgccactgttcatcccagctttgttttccttcacatgcctcttcatggttgccctttccctctattcggacccatttagtacagggattggcttcgtcatcactctgactggagtccctgcgtattatctctttattatatgggacaagaaacccaggtggtttagaataatgtcagagaaaataaccagaacattacaaataatactggaagttgtaccagaagaagataagttatgaactaatggacttgagatcttggcaatctgcccaaggggagacacaaaatagggatttttacttcattttctgaaagtctagagaattacaactttggtgataaacaaaaggagtcagttatttttattcatatattttagcatattcgaactaatttctaagaaatttagttataactctatgtagttatagaaagtgaatatgcagttattctatgagtcgcacaattcttgagtctctgatacctacctattggggttaggagaaaagactagacaattactatgtggtcattctctacaacatatgttagcacggcaaagaaccttcaaattgaagactgagatttttctgtatatatgggttttgtaaagatggttttacacactacagatgtctatactgtgaaaagtgttttcaattctgaaaaaaagcatacatcatgattatggcaaagaggagagaaagaaatttattttacattgacattgcattgcttccccttagataccaatttagataacaaacactcatgctttaatggattatacccagagcactttgaacaaaggtcagtggggattgttgaatacattaaagaagagtttctaggggctactgtttatgagacacatccaggagttatgtttaagtaaaaatccttgagaatttattatgtcagatgttttttcattcattatcaggaagttttagttatctgtcatttttttttttcacatcagtttgatcaggaaagtgtataacacatcttagagcaagagttagtttggtattaaatcctcattagaacaaccacctgtttcactaataacttacccctgatgagtctatctaaacatatgcattttaagccttcaaattacattatcaacatgagagaaataaccaacaaagaagatgttcaaaataatagtcccatatctgtaatcatatctacatgcaatgttagtaattctgaagttttttaaatttatggctatttttacacgatgatgaattttgacagtttgtgcattttctttatacattttatattcttctgttaaaatatctcttcagatgaaactgtccagattaattaggaaaaggcatatattaacataaaaattgcaaaagaaatgtcgctgtaaataagatttacaactgatgtttctagaaaatttccacttctatatctaggctttgtcagtaatttccacaccttaattatcattcaacttgcaaaagagacaactgataagaagaaaattgaaatgagaatctgtggataagtgtttgtgttcagaagatgttgttttgccagtattagaaaatactgtgagccgggcatggtggcttacatctgtaatcccagcactttgggaggctgagggggtggatcacctgaggtcgggagttctagaccagcctgaccaacatggagaaaccccatctctactaaaaatacaaaattagctgggcatggtggcacatgctggtaatctcagctattgaggaggctgaggcaggagaattgcttgaacccgggaggcggaggttgcagtgagccaagattgcaccactgtactccagcctgggtgacaaagtcagactccatctccaaaaaaaaaaaaaaaa

SEQ ID NO: 8 - protein, 501 aa, Homo sapiens
MVRKPVVSTISKGGYLQGNVNGRLPSLGNKEPPGQEKVQLKRKVTLLRGVSIIIGTIIGAGIFISPKGVLQNTGSVGMSLTIWTVCGVLSLFGALSYAELGTTIKKSGGHYTYILEVFGPLPAFVRVWVELLIIRPAATAVISLAFGRYILEPFFIQCEIPELAIKLITAVGITVVMVLNSMSVSWSARIQIFLTFCKLTAILIIIVPGVMQLIKGQTQNFKDAFSGRDSSITRLPLAFYYGMYAYAGWFYLNFVTEEVENPEKTIPLAICISMAIVTIGYVLTNVAYFTTINAEELLLSNAVAVTFSERLLGNFSLAVPIFVALSCFGSMNGGVFAVSRLFYVASREGHLPEILSMIHVRKHTPLPAVIVLHPLTMIMLFSGDLDSLLNFLSFARWLFIGLAVAGLIYLRYKCPDMHRPFKVPLFIPALFSFTCLFMVALSLYSDPFSTGIGFVITLTGVPAYYLFIIWDKKPRWFRIMSEKITRTLQIILEVVPEEDKL

SEQ ID NO: 9 - DNA, 546 bp, Homo sapiens
atggccttgggcagctccgcccctgtggctttgcagggtaatgcccacttccctgctgctttcatggctggcattaagtgtctgtggcttttccaggtagtccccctggggctccccgagttggtgcaaaggctcctgggtggagctcgaactgaaactcgctttgtgcccgcagccctgcagctcgccggtgccctcgacctgcccgctgggtcctgtgcctttgaagagagcacttgcggctttgactccgtgttggcctctctgccgtggattttaaatgaggaaggccagcaacctttctggtcctcaggagacatgtctgactgggactactgggttggctggcggaagttaattcattctcctctgagcactccagggtggagcaggcaggttaggctccagttgttccagcttcagtttgtcaaaggccagaacttggacgtaacagtgtactgcaggctccagggcagtgagaaaccctttgaaactggttccatggttccattcaccttcatgtactggatccaccatggaaagtag

SEQ ID NO: 10 - protein, 181 aa, Homo sapiens
MALGSSAPVALQGNAHFPAAFMAGIKCLWLFQVVPLGLPELVQRLLGGARTETRFVPAALQLAGALDLPAGSCAFEESTCGFDSVLASLPWILNEEGQQPFWSSGDMSDWDYWVGWRKLIHSPLSTPGWSRQVRLQLFQLQFVKGQNLDVTVYCRLQGSEKPFETGSMVPFTFMYWIHHGK

SEQ ID NO: 11 - DNA, 5786 bp, Homo sapiens
gccgcccctgagcagcctcgccttcgcctcccgcgtttcctgccgtccgccctcccccggccgagctccaggggctgccgcctagcagctcccggcgggagagcggttcagagcgcgcacgggggcgggcggaggcggcccggtgcggggcggccgcgctggagagaggcgcgcgcggagacgccggcccccctctccgcgtttgctcgcttgctccccgcctcccgcactccgctcgctcccaccccttcccggcgtgattgatccgtcacgggcgccgccgctgccgccgccgccgccgcggccgttctgagccgagccggaaccctagcccgagacggagccggggcccgggccggcgccattgcgcgggcgccgcgggaagaccttggcgcggggcggcgggccgggccaggccatgcgggccgagtgagccggcgcccgcagcccgcggcgcggcatggcttccccgcggagctccgggcagcccgggccgccgccgccgccgccaccgccgcccgcgcgcctgctactgctactgctgctgccgctgctgctgcctctggcgcccggggcctggggctgggcgcggggcgccccccggccgccgcccagcagcccgccgctctccatcatgggcctcatgccgctcaccaaggaggtggccaagggcagcatcgggcgcggtgtgctccccgccgtggaactggccatcgagcagatccgcaacgagtcactcctgcgcccctacttcctcgacctgcggctctatgacacggagtgcgacaacgcaaaagggttgaaagccttctacgatgcaataaaatacgggcctaaccacttgatggtgtttggaggcgtctgtccatccgtcacatccatcattgcagagtccctccaaggctggaatctggtgcagctttcttttgctgcaaccacgcctgttctagccgataagaaaaaatacccttatttctttcggaccgtcccatcagacaatgcggtgaatccagccattctgaagttgctcaagcactaccagtggaagcgcgtgggcacgctgacgcaagacgttcagaggttctctgaggtgcggaatgacctgactggagttctgtatggcgaggacattgagatttcagacaccgagagcttctccaacgatccctgtaccagtgtcaaaaagctgaaggggaatgatgtgcggatcatccttggccagtttgaccagaatatggcagcaaaagtgttctgttgtgcatacgaggagaacatgtatggtagtaaatatcagtggatcattccgggctggtacgagccttcttggtgggagcaggtgcacacggaagccaactcatcccgctgcctccggaagaatctgcttgctgccatggagggctacattggcgtggatttcgagcccctgagctccaagcagatcaagaccatctcaggaaagactccacagcagtatgagagagagtacaacaacaagcggtcaggcgtggggcccagcaagttccacgggtacgcctacgatggcatctgggtcatcgccaagacactgcagagggccatggagacactgcatgccagcagccggcaccagcggatccaggacttcaactacacggaccacacgctgggcaggatcatcctcaatgccatgaacgagaccaacttcttcggggtcacgggtcaagttgtattccggaatggggagagaatggggaccattaaatttactcaatttcaagacagcagggaggtgaaggtgggagagtacaacgctgtggccgacacactggagatcatcaatgacaccatcaggttccaaggatccgaaccaccaaaagacaagaccatcatcctggagcagctgcggaagatctccctacctctctacagcatcctctctgccctcaccatcctcgggatgatcatggccagtgcttttctcttcttcaacatcaagaaccggaatcagaagctcataaagatgtcgagtccatacatgaacaaccttatcatccttggagggatgctctcctatgcttccatatttctctttggccttgatggatcctttgtctctgaaaagacctttgaaacactttgcaccgtcaggacctggattctcaccgtgggctacacgaccgcttttggggccatgtttgcaaagacctggagagtccacgccatcttcaaaaatgtgaaaatgaagaagaagatcatcaaggaccagaaactgcttgtgatcgtggggggcatgctgctgatcgacctgtgtatcctgatctgctggcaggctgtggaccccctgcgaaggacagtggagaagtacagcatggagccggacccagcaggacgggatatctccatccgccctctcctggagcactgtgagaacacccatatgaccatctggcttggcatcgtctatgcctacaagggacttctcatgttgttcggttgtttcttagcttgggagacccgcaacgtcagcatccccgcactcaacgacagcaagtacatcgggatgagtgtctacaacgtggggatcatgtgcatcatcggggccgctgtctccttcctgacccgggaccagcccaatgtgcagttctgcatcgtggctctggtcatcatcttctgcagcaccatcaccctctgcctggtattcgtgccgaagctcatcaccctgagaacaaacccagatgcagcaacgcagaacaggcgattccagttcactcagaatcagaagaaagaagattctaaaacgtccacctcggtcaccagtgtgaaccaagccagcacatcccgcctggagggcctacagtcagaaaaccatcgcctgcgaatgaagatcacagagctggataaagacttggaagaggtcaccatgcagctgcaggacacaccagaaaagaccacctacattaaacagaaccactaccaagagctcaatgacatcctcaacctgggaaacttcactgagagcacagatggaggaaaggccattttaaaaaatcacctcgatcaaaatccccagctacagtggaacacaacagagccctctcgaacatgcaaagatcctatagaagatataaactctccagaacacatccagcgtcggctgtccctccagctccccatcctccaccacgcctacctcccatccatcggaggcgtggacgccagctgtgtcagcccctgcgtcagccccaccgccagcccccgccacagacatgtgccaccctccttccgagtcatggtctcgggcctgtaagggtgggaggcctgggcccggggcctcccccgtgacagaaccacactgggcagaggggtctgctgcagaaacactgtcggctctggctgcggagaagctgggcaccatggctggcctctcaggaccactcggatggcactcaggtggacaggacggggcagggggagacttggcacctgacctcgagccttatttgtgaagtccttatttcttcacaaagaagaggaacggaaatgggacgtcttccttaacatctgcaaacaaggaggcgctgggatatcaaacttgcaaaaaaaaaaaaaaaaaaaaaaaaacaaaaaaactagacaaggagagaggcactagaactccagctggaagtcacggagtggctcgagcagccttgggaagaggcaaggagcttctgaagaaactgcctctgcacacacatcactggctgtgacccctcaggctagcccttctccactctgggggaggaggtgggaagggccaccaggcccccagctgccaggccagctgaccccagccttcctggaacagggagtctgcaggagcgcagacaggcacagccctggagcaggcaggccgagggctgcggcactggagcaggctgacttacatgctccacatgggacctgtgtcacccaatgagatgtttgttactctggtaaatgccacacgttaacacaataacacccattcctgggaccgtggggatttagggcacgtcactgcagacacgctctgcagcattcaccgacagtctgtcatgcacccaccacgttggccatgtccttgtgttcctatcggatgctcccagtaaccagggggaccacccgagctaatcatggaatgtctgttcccagcaaacacgataaagaaagattgtgcactttaacctctctcatcagggcccaagggctggctgggattttttttttttttttcccactaactttgtttctgaccaaagtgaattggaggcactctgctaaaagacatccccgtagacataggggagagagttgctggctgagggcttcccttggcttccagaaggcagccttccatccagacaagccagtgagctctccccttgggatcactggggtgatcagtcagcagattgattctcattcataagatcattcctccctttaaattgagcccctaagagcactggcctgggagtcagacagacctgggttcaagtcctcagtcccctgcccactccctacgtgactttgatcaggtcactagtgtctctctgagcctcagtttcccctctgtaacttggggttgaactaaaacacctgtcctgcctacctcacaaggtcactctgaggattgaaacttgatcttgtccaggaaagctttgtaccaaacagtgaagccgccctgatccgtgaggtatgagtatgactctgaccttcagccctccctacagccgggggtgtggcccagagaagcttccagcacagccctctacccagaacatccgggctggagggaggctcccagtgacttttctgacattcctagacaggttcattctttgctcaagaaaggcctgaatgacaatgtccaggatgtctgcacaactgagcagctcgctcactccctaaagaaacctattggcagcttcaacaggcaggcaataatctcttcccagaaccactgcagtcaggaataaactgttttctccaccaggctttgacaaaagggcccacaggaatcttaccaatgccaacatttcaaagcaccctatttcacgtagcatagctttctgctccccttccccaaagagaggttatggaggtactgtagcttttagggaaaaaaaaatgttaacacatcacaggtcaagttgaagtcattctctgtttaggcactaaaaatcggtgttgtcactcactgtgtattaccagtatttacttgctttcttgatttcaccaaaaccaaatttaatttaaaggaccacattaatttttcaaagggaaagagacaattaattgtacataatgtatacacacacacaaaaaaaaatacctgtagaaatattattccagcatagcaggaaaacaaacaaaagtattggactgtcggaggtgagcctgtgcgtctgtaaccctttgtgactcctgagcgtgcgctgtcttctaggttaactcacgaagtacattctctgtcttactgatactgtaggttcacccatttttttttaatttcctcgcaaataacaagacccacagaagtgactctagctacttaatggttctgttcttttatatgcagcaaacacaccgtccatttctgaagaggcttcggcctgaaggcattttccaatgatgttagtgcacaaaacgctttaaattagactggaactgccagaatcaaatgtaaatgaggaatttctcgtacccctactgcatggtatcgatttttaataaattgttgcaaatttgtttttatgaataaaaggaaaaaacctgtcgtcttt

SEQ ID NO: 12 - protein, 941 aa, Homo sapiens
MASPRSSGQPGPPPPPPPPPARLLLLLLLPLLLPLAPGAWGWARGAPRPPPSSPPLSIMGLMPLTKEVAKGSIGRGVLPAVELAIEQIRNESLLRPYFLDLRLYDTECDNAKGLKAFYDAIKYGPNHLMVFGGVCPSVTSIIAESLQGWNLVQLSFAATTPVLADKKKYPYFFRTVPSDNAVNPAILKLLKHYQWKRVGTLTQDVQRFSEVRNDLTGVLYGEDIEISDTESFSNDPCTSVKKLKGNDVRIILGQFDQNMAAKVFCCAYEENMYGSKYQWIIPGWYEPSWWEQVHTEANSSRCLRKNLLAAMEGYIGVDFEPLSSKQIKTISGKTPQQYEREYNNKRSGVGPSKFHGYAYDGIWVIAKTLQRAMETLHASSRHQRIQDFNYTDHTLGRIILNAMNETNFFGVTGQVVFRNGERMGTIKFTQFQDSREVKVGEYNAVADTLEIINDTIRFQGSEPPKDKTIILEQLRKISLPLYSILSALTILGMIMASAFLFFNIKNRNQKLIKMSSPYMNNLIILGGMLSYASIFLFGLDGSFVSEKTFETLCTVRTWILTVGYTTAFGAMFAKTWRVHAIFKNVKMKKKIIKDQKLLVIVGGMLLIDLCILICWQAVDPLRRTVEKYSMEPDPAGRDISIRPLLEHCENTHMTIWLGIVYAYKGLLMLFGCFLAWETRNVSIPALNDSKYIGMSVYNVGIMCIIGAAVSFLTRDQPNVQFCIVALVIIFCSTITLCLVFVPKLITLRTNPDAATQNRRFQFTQNQKKEDSKTSTSVTSVNQASTSRLEGLQSENHRLRMKITELDKDLEEVTMQLQDTPEKTTYIKQNHYQELNDILNLGNFTESTDGGKAILKNHLDQNPQLQWNTTEPSRTCKDPIEDINSPEHIQRRLSLQLPILHHAYLPSIGGVDASCVSPCVSPTASPRHRHVPPSFRVMVSGL

SEQ ID NO: 13 - DNA, 1120 bp, Homo sapiens
gagacattcctcaattgcttagacatattctgagcctacagcagaggaacctccagtctcagcaccatgaatcaaactgcgattctgatttgctgccttatctttctgactctaagtggcattcaaggagtacctctctctagaaccgtacgctgtacctgcatcagcattagtaatcaacctgttaatccaaggtctttagaaaaacttgaaattattcctgcaagccaattttgtccacgtgttgagatcattgctacaatgaaaaagaagggtgagaagagatgtctgaatccagaatcgaaggccatcaagaatttactgaaagcagttagcaaggaaatgtctaaaagatctccttaaaaccagaggggagcaaaatcgatgcagtgcttccaaggatggaccacacagaggctgcctctcccatcacttccctacatggagtatatgtcaagccataattgttcttagtttgcagttacactaaaaggtgaccaatgatggtcaccaaatcagctgctactactcctgtaggaaggttaatgttcatcatcctaagctattcagtaataactctaccctggcactataatgtaagctctactgaggtgctatgttcttagtggatgttctgaccctgcttcaaatatttccctcacctttcccatcttccaagggtactaaggaatctttctgctttggggtttatcagaattctcagaatctcaaataactaaaaggtatgcaatcaaatctgctttttaaagaatgctctttacttcatggacttccactgccatcctcccaaggggcccaaattctttcagtggctacctacatacaattccaaacacatacaggaaggtagaaatatctgaaaatgtatgtgtaagtattcttatttaatgaaagactgtacaaagtataagtcttagatgtatatatttcctatattgttttcagtgtacatggaataacatgtaattaagtactatgtatcaatgagtaacaggaaaattttaaaaatacagatagatatatgctctgcatgttacataagataaatgtgctgaatggttttcaaataaaaatgaggtactctcctggaaatattaag

SEQ ID NO: 14 - protein, 98 aa, Homo sapiens
MNQTAILICCLIFLTLSGIQGVPLSRTVRCTCISISNQPVNPRSLEKLEIIPASQFCPRVEIIATMKKKGEKRCLNPESKAIKNLLKAVSKEMSKRSP

SEQ ID NO: 15 - DNA, 5838 bp, Homo sapiens
gcgcagacgccccagccccccaccgcccccaaaggggcgagcgacgccaagctctgcgctctctacaaagaggccgagctgcgcctgaagggcagcagcaacaccacggagtgtgttcccgtgcccacctccgagcacgtggccgagatcgtgggcaggcaaggctgcaagattaaggccttgagggccaagaccaacacctacatcaagacaccggtgaggggcgaggaaccagtgttcatggtgacagggcgacgggaggacgtggccacagcccggcgggaaatcatctcagcagcggagcacttctccatgatccgtgcctcccgcaacaagtcaggcgccgcctttggtgtggctcctgctctgcccggccaggtgaccatccgtgtgcgggtgccctaccgcgtggtggggctggtggtgggccccaaaggggcaaccatcaagcgcatccagcagcaaaccaacacatacattatcacaccaagccgtgaccgcgaccccgtgttcgagatcacgggtgccccaggcaacgtggagcgtgcgcgcgaggagatcgagacgcacatcgcggtgcgcactggcaagatcctcgagtacaacaatgaaaacgacttcctggcggggagccccgacgcagcaatcgatagccgctactccgacgcctggcgggtgcaccagcccggctgcaagcccctctccaccttccggcagaacagcctgggctgcatcggcgagtgcggagtggactctggctttgaggccccacgcctgggtgagcagggcggggactttggctacggcgggtacctctttccgggctatggcgtgggcaagcaggatgtgtactacggcgtggccgagactagccccccgctgtgggcgggccaggagaacgccacgcccacctccgtgctcttctcctctgcctcctcctcctcctcctcttccgccaaggcccgcgctgggcccccgggcgcacaccgctcccctgccacttccgcgggacccgagctggccggactcccgaggcgccccccgggagagccgctccagggcttctctaaacttggtgggggcggcctgcggagccccggcggcgggcgggattgcatggtctgctttgagagcgaagtgactgccgcccttgtgccctgcggacacaacctgttctgcatggagtgtgcagtacgcatctgcgagaggacggacccagagtgtcccgtctgccacatcacagccacgcaagccatccgaatattctcctaagccccgtgccccatgcctccggggcccactccactgggcccaccctggacctgttttccactaaagccttttggaaagcggtgatttgaggggcaaggtgcttagagatactcgctcgctggggaaggggggagggaggcagtggtggctggagggtgcgccactttcagagcctctggtcaccctgtcctggaaagattgggagggggccagactgaaaattttactagagttacaactctgatacctcaacacacccttaaatctggaagcagctaagagaaacttttgttttgccagaggtggccactaaggcattctgacgccctctgcccacctcccccgctgtgtgtcactccaccccttcttccgaggagggggtgggtaaaagggagagggagaattaccacctgtatctagaggtgctctttgcaatccctaagccctctggtcctgacctccgacctcctaacatgaccctttacctcccaccccacccccatatcctgtttgggaaactgtcaccagtttccagcagtgtaagggagttggagtcctatcagaagttgcatagatcttctaggggttggggagagaagcatgtcaatcgtttctgtggctgaaaggctcagaagccatctgtccccacaaagctgggctagaggaatctggagaggagtcctcctctctgcccctgtcccctgcagtgtttcccttcactctctccgcctatcttcccttcctttgggatcttccctttcctcaactctttcctttccctccagctctttgctttgctttcttttggtggctgtcactcccagctctgtcttgttccttgtctttgtctttcttcccttccccctgcccctgcccctaccagcccagctttggggacaccatccttctggggagaagtagggggaggaatatttggatggtccctccattcctcttcaggcatctggaggccctctcccccactcctccaaagaaacatctcaaattattgatggaatgtatccccattctcagtgaaaatgtgaggaggggactaatactggggtaaagggtcaaacccccaccttcatcactatgggcattatatttagggagtagttcttgggctggattttctggttgtggaagtgggggcgccagagtagtgtgtctgctatttaaaggagcaggaaagggcgtgaggcaggaggagagactggtggagggaagagctgctcctcccatgcagtgcccgactccctgcacccctctcaacctgacctgaacctttattgaatccttattagcttgaatccttattagcttgaatcctccatgcaaatcatggagtctgtgtcccacctgatgtggttgaggagaagccaggtcttcaaagaggggtcagcctggggcaaagcaggactggggggaggtgggcagcagggcctattctgagaatcacatattgttacaggccttgcaccccctttgctgcttccctcctgctcatttggggctgccaccagctctccaccctcctggttccgctggccgggccaagagaggatggagggatgggagtcccaggagatccttgtaaatagtggggtgggactgttctgagtgatcacccgagcacttaaagctccagagtcccattcttcctggatggagcaggtggaggtgcagaggggatttcctcctctccttcctcctgtcgagaattaacacctctccacagccttcccctccagaacaccagccagggaggggtggggaaggaggtcacagccaagaaaactgccctgtgacgacttccctccttcccgcctatgtgagccatcctgagatgtctgtacaatagaaaccaaaccaaatgggcaccctcggttgccggggggcaggtggggaggggggtgggaagaagggatgtctgtctgtcgtccccctccccctctccactctttacccacaaaggcagaagactgttacactagggggctcagcaaattcaatcccacccttaccaattgagccaaacctagaaacaaacacaaaacacgaatagtgagagacaaaatagaggagagaaagagagcatgagagggagcgagacaggcgaccaacacagaggagagaaaacaaaaatagcaaaaaaaaaaaaaaaaagcagttctttataatttaatattctattttaataaaggcgtttattaccatataaatgtagcaaagaacctgggctaatatgaaaaaaaaagactttttattaggtaatttattatatgaaaaggatattttattttatgataaagtgatccttaaaaaaataaaaaaactttagaaggtttagaatatatgtagggagagaagaagaaaaaaatacatttgtattcagagttaaatcttaaaaaaaaaaagtgtttttaatatatgtttgggtttacgttgcttttttcccccactttttttttggggaggaatgtcatttgcttttcttgggggagcatcccgggggtgaatggtggagagaggagctgggggaacccggtccctcctgggacccttccagtagattggatttcactccatggactcctcctcccctctccccctccccctcaggggagccggcagagccaaacaaagaaagggattaacaagaaaggaagaagctgtaggactaaggactgaggatcctggggtgtcccccaccactttcccctgccctgtcgcaggggcaagtgaggagggggaatccagaattaaggcctagcaggcctataggaaccctcagagatgtgtgagatttaagagatctagatttttttttaaccaaaaacaagagagaaagagaagaaaaagagaaaccgaggggtttaaaagaaaagaatactacaaaataataattattaataataataattcaaatttatttcatataatcctagagagagaaagaaacaattactagttacttagtagacaatattaagatagcttaaagtttagtagcattgagggcccctgggtccagtagaatgtataaaagttgtaaggaaaagataaatagaggagggaagtggctgagtccaccctgagttgcccaatcttcagataccagggttggatcaggttgctagtttaagattgggagcttccagtctgctggggttgattctgagaatccttggatttttaaattgtaggacaaagaaatgaggggttcatttcccagggtcttggaaaggatgcacactgatcatctcaataagacaggggctgggttgggggcagcagaggaggccaagcacattcacctgcacccctagtacctgggcagcccatactccaatgtggtatgtcccctcctggggctcccagctcaaaccctcccatgcctgcttcccccaggcctaactgaggaagtccttcttgaagtgtgacctcggtccacttctctacagattgatttaagagcctgggaagtcattccacaaacagacacacatgcacacacgcttctcaccttcagagcttcaagagcactgaggcgatcagtcccctacccctgttcccatccagctttccacttagctttgacctccatggcagcagtagcagtaacaatctcagtaattgttctttaaagctgactcgttcttcacctacttgcaaagtgctttcttgtctcataaaagttagattccaagaaggacttcccacggagtggagtggaaacactgtccttgaaggcctgggagaaaggcatccccatgggcacagaggctggggaaaggcacagggactttgggtgaccctaaccctgaccctctgctccagttcacctccatctatatgtgttcaggtaggggtcatctactgtaccctggcctgggaacacattgccctccccacacaaaactggagggcttggcttctgcgtgtgagaaatcaacatttttaaagcacttgccttctaccaaccccagcttgcaatcactgggccttcccctcctatccaaggggttggaggggccccttggctctccttttggcaggaggagcctgcttcattacaccaatgactctgccatccccctccctggccctagaccccaaacacatctccctctacccaatttactcttctcgccccacctagggacagattccccctgctctttttgtcctagaaaccccgctagtttgggatggtagcgtctggggtggggagggcttccccttccccactcgagggtgcgggtggggaagggggggtgggtggagacagccctggggcagggaggatggtctctccactgtagaaagtagagtaggattgtggtcagacttaatttgaggcatctagtgaagacacgtacaaatccaccaaggaaaaagatttcaaaagcaaaataaaagcgggaaataaaacagacccaagaataatcaagtcaaagtgatgttgcacaaaatgcagagaaaccaagaagggggagggttaatgtattaaatgtgctattaagaacttaattttattaaaagtactattacttaaggctc

SEQ ID NO: 16 - protein, 343 aa, Homo sapiens
MVTGRREDVATARREIISAAEHFSMIRASRNKSGAAFGVAPALPGQVTIRVRVPYRVVGLVVGPKGATIKRIQQQTNTYIITPSRDRDPVFEITGAPGNVERAREEIETHIAVRTGKILEYNNENDFLAGSPDAAIDSRYSDAWRVHQPGCKPLSTFRQNSLGCIGECGVDSGFEAPRLGEQGGDFGYGGYLFPGYGVGKQDVYYGVAETSPPLWAGQENATPTSVLFSSASSSSSSSAKARAGPPGAHRSPATSAGPELAGLPRRPPGEPLQGFSKLGGGGLRSPGGGRDCMVCFESEVTAALVPCGHNLFCMECAVRICERTDPECPVCHITATQAIRIFS

SEQ ID NO: 17 - DNA, 2260 bp, Homo sapiens
aagcccagcagccccggggcggatggctccggccgcctggctccgcagcgcggccgcgcgcgccctcctgcccccgatgctgctgctgctgctccagccgccgccgctgctggcccgggctctgccgccggacgtccaccacctccatgccgagaggagggggccacagccctggcatgcagccctgcccagtagcccggcacctgcccctgccacgcaggaagccccccggcctgccagcagcctcaggcctccccgctgtggcgtgcccgacccatctgatgggctgagtgcccgcaaccgacagaagaggttcgtgctttctggcgggcgctgggagaagacggacctcacctacaggatccttcggttcccatggcagttggtgcaggagcaggtgcggcagacgatggcagaggccctaaaggtatggagcgatgtgacgccactcacctttactgaggtgcacgagggccgtgctgacatcatgatcgacttcgccaggtactggcatggggacgacctgccgtttgatgggcctgggggcatcctggcccatgccttcttccccaagactcaccgagaaggggatgtccacttcgactatgatgagacctggactatcggggatgaccagggcacagacctgctgcaggtggcagcccatgaatttggccacgtgctggggctgcagcacacaacagcagccaaggccctgatgtccgccttctacacctttcgctacccactgagtctcagcccagatgactgcaggggcgttcaacacctatatggccagccctggcccactgtcacctccaggaccccagccctgggcccccaggctgggatagacaccaatgagattgcaccgctggagccagacgccccgccagatgcctgtgaggcctcctttgacgcggtctccaccatccgaggcgagctctttttcttcaaagcgggctttgtgtggcgcctccgtgggggccagctgcagcccggctacccagcattggcctctcgccactggcagggactgcccagccctgtggacgctgccttcgaggatgcccagggccacatttggttcttccaaggtgctcagtactgggtgtacgacggtgaaaagccagtcctgggccccgcacccctcaccgagctgggcctggtgaggttcccggtccatgctgccttggtctggggtcccgagaagaacaagatctacttcttccgaggcagggactactggcgtttccaccccagcacccggcgtgtagacagtcccgtgccccgcagggccactgactggagaggggtgccctctgagatcgacgctgccttccaggatgctgatggctatgcctacttcctgcgcggccgcctctactggaagtttgaccctgtgaaggtgaaggctctggaaggcttcccccgtctcgtgggtcctgacttctttggctgtgccgagcctgccaacactttcctctgaccatggcttggatgccctcaggggtgctgacccctgccaggccacgaatatcaggctagagacccatggccatctttgtggctgtgggcaccaggcatgggactgagcccatgtctcctgcagggggatggggtggggtacaaccaccatgacaactgccgggagggccacgcaggtcgtggtcacctgccagcgactgtctcagactgggcagggaggctttggcatgacttaagaggaagggcagtcttgggacccgctatgcaggtcctggcaaacctggctgccctgtctcatccctgtccctcagggtagcaccatggcaggactgggggaactggagtgtccttgctgtatccctgttgtgaggttccttccaggggctggcactgaagcaagggtgctggggccccatggccttcagccctggctgagcaactgggctgtagggcagggccacttcctgaggtcaggtcttggtaggtgcctgcatctgtctgccttctggctgacaatcctggaaatctgttctccagaatccaggccaaaaagttcacagtcaaatggggaggggtattcttcatgcaggagaccccaggccctggaggctgcaacatacctcaatcctgtcccaggccggatcctcctgaagcccttttcgcagcactgctatcctccaaagccattgtaaatgtgtgtacagtgtgtataaaccttcttcttcttttttttttttaaactgaggattgtcattaaacacagttgttttct

SEQ ID NO: 18 - protein, 488 aa, Homo sapiens
MAPAAWLRSAAARALLPPMLLLLLQPPPLLARALPPDVHHLHAERRGPQPWHAALPSSPAPAPATQEAPRPASSLRPPRCGVPDPSDGLSARNRQKRFVLSGGRWEKTDLTYRILRFPWQLVQEQVRQTMAEALKVWSDVTPLTFTEVHEGRADIMIDFARYWHGDDLPFDGPGGILAHAFFPKTHREGDVHFDYDETWTIGDDQGTDLLQVAAHEFGHVLGLQHTTAAKALMSAFYTFRYPLSLSPDDCRGVQHLYGQPWPTVTSRTPALGPQAGIDTNEIAPLEPDAPPDACEASFDAVSTIRGELFFFKAGFVWRLRGGQLQPGYPALASRHWQGLPSPVDAAFEDAQGHIWFFQGAQYWVYDGEKPVLGPAPLTELGLVRFPVHAALVWGPEKNKIYFFRGRDYWRFHPSTRRVDSPVPRRATDWRGVPSEIDAAFQDADGYAYFLRGRLYWKFDPVKVKALEGFPRLVGPDFFGCAEPANTFL

SEQ ID NO: 19 - DNA, 1442 bp, Homo sapiens
ggttcccttccacgctgtgaagctttgttcttttggtcttcatgataaatcttgctgctgctcactcgttgggtccgtgccacctttaagagctgtaacactcaccgcgaaggtctgcaacttcactcctggggccagcaagaccacgaatgcaccgagaggaatgaacaactctggacacaccatctttaagaaccgtaatactcaccgcaagggtctgcaacttcattcttgaagtcagtgaggccaagaacccatcaattccgtacacattttggtgactttgaagagactgtcacctatcaccaagtggtgagactattgccaagcagtgagactattgccaagtggtgagaccatcaccaagcggtgagactatcacctatcgccaagtggcctgattcagcaggaagcatctcagacaccaaccactatgctgtcagcagttgcccggggctaccagggctggtttcatccctgtgctaggctttctgtgaggatgagcagcaccgggatagacaggaagggcgtcctggctaaccgggtagccgtggtcacggggtccaccagtgggatcggctttgccatcgcccgacgtctggcccgggacggggcccacgtggtcatcagcagccggaagcagcagaacgtggaccgggccatggccaagctgcagggggaggggctgagtgtggcgggcattgtgtgccacgtggggaaggctgaggaccgggagcagctggtggccaaggccctggagcactgtgggggcgtcgacttcctggtgtgcagcgcaggggtcaaccctctggtagggagcactctggggaccagtgagcagatctgggacaagatcctaagtgtgaacgtgaagtccccagccctgctgctgagccagttgctgccctacatggagaacaggaggggtgctgtcatcctggtctcttccattgcagcttataatccagtagtggcgctgggtgtctacaatgtcagcaagacagcgctgctgggtctcactagaacactggcattggagctggcccccaaggacatccgggtaaactgcgtggttccaggaattataaaaactgacttcagcaaagtgtttcatgggaatgagtctctctggaagaacttcaaggaacatcatcagctgcagaggattggggagtcagaggactgtgcaggaatcgtgtccttcctgtgctctccagatgccagctacgtcaacggggagaacattgcggtggcaggctactccactcggctctgagaggagtgggggcggctgcgtagctgtggtcccagcccaggagcctgagggggtgtctaggtgatcatttggatctggagcagagtctgccattctgccagactagcaatttgggggcttactcatgctaggcttgaggaagaagaaaaacgcttcggcattctcc

SEQ ID NO: 20 - protein, 280 aa, Homo sapiens
MLSAVARGYQGWFHPCARLSVRMSSTGIDRKGVLANRVAVVTGSTSGIGFAIARRLARDGAHVVISSRKQQNVDRAMAKLQGEGLSVAGIVCHVGKAEDREQLVAKALEHCGGVDFLVCSAGVNPLVGSTLGTSEQIWDKILSVNVKSPALLLSQLLPYMENRRGAVILVSSIAAYNPVVALGVYNVSKTALLGLTRTLALELAPKDIRVNCVVPGIIKTDFSKVFHGNESLWKNFKEHHQLQRIGESEDCAGIVSFLCSPDASYVNGENIAVAGYSTRL

SEQ ID NO: 21 - DNA, 4202 bp, Homo sapiens
gccgcgttttgcctccgcagcagctctgggctcttctcagctgcgcgagcagctgctccaatgccccggagtggccatgggcgccccgcactggtgggaccagctgcaggctggtagctcggaggtggactggtgcgaggacaactacaccatcgtgcctgctatcgccgagttctacaacacgatcagcaatgtcttatttttcattttaccgcccatctgcatgtgcttgtttcgtcagtatgcaacatgcttcaacagtggcatctacttaatctggactcttttggttgtagtgggaattggatccgtctacttccatgcaacccttagtttcttgggtcagatgcttgatgaacttgcagtcctttgggttctgatgtgtgctttggccatgtggttccccagaaggtatctaccaaagatctttcggaatgaccggggtaggttcaaggtggtggtcagtgtcctgtctgcggttacgacgtgcctggcatttgtcaagcctgccatcaacaacatctctctgatgaccctgggagttccttgcactgcactgctcatcgcagagctaaagaggtgtgacaacatgcgtgtgtttaagctgggcctcttctcgggcctctggtggaccctggccctgttctgctggatcagtgaccgagctttctgcgagctgctgtcatccttcaacttcccctacctgcactgcatgtggcacatcctcatctgccttgctgcctacctgggctgtgtatgctttgcctactttgatgctgcctcagagattcctgagcaaggccctgtcatcaagttctggcccaatgagaaatgggccttcattggtgtcccctatgtgtccctcctgtgtgccaacaagaaatcatcagtcaagatcacgtgatggcaagatggtggctggcttctctgcttatcgcccctcatgcagtgggcttcctttgctaggaagacagccaagggagttcgaatagttggggtgtgggctatcttttcaaaaatctatttgctggggctcttaatttctttagtgttctttgtatgtagggatttaaactttgtcatatggtacaaatattccctgcccccctgcagtttcccatttgtctttcagtatgttaatatttttgtgccatactggttttaaactttcatgttgtcacatctgttaatcttttctttaggatttctggattttgtgtaatttttaaaaaggtcccctcctcctccctaatgtgtctgtggaccacctggattccactgtacaaggggaaaagtgtctattcctttcccaaagatggaaaatggagggcttagggacactagatgcatctttctcagcatcacttccagatgcagtgacttgttgggctgcgtccttaatggccatggcagagcagtcccttgggggatccagccctgtacaatgcatctcttcctggagaaagctggcctgctccagaccccaccattcccaggcgcccttggagtggactctactgatgacagacagaccctctgagagacaagaccctctgactctgtgatggaagatgccagagattttcctttggggtaattgtccttaaacaaaaccaaacagatgaaacacacacaggacttgtggctaaaaaggctagtttttcacttgcatttctcaactaacccaggttttacatgcatctgtgaatccttttactactacctctgtggagagatggagagacttcagataaacgtgaagctaatgagtaaaaccctctctgccaaaacctacactccactttaggcccttcttgaagatgagcacaatttttaaatactgagcacaatttttaaatactgacatcacttcctcttccccctcccaccccagctcagcagcctcaaatctacagagaagaagaattatggcatgaacattcccacagacccaccatctttaagacttgacctctgtaagtttaccaaagggctcctcacaattgtggtgggggttctggttcaaaatttggagcaaacatgaagtttttggaaacgttttctcatttgaagcctccagtatgctgtactattctggaaattaccttcaagagtctcacttcttgtttctgttgtgttttctgtgggcatcatgttcttcacgcttgcagtagaaggtgctttctcggtttcccagagtatccaacggctcacctttctcaagtgctggcagtagctatgcactcacgggctggtttgggtcgctggtgcagcagcgcaaatctgttgccttctgaatttttctcacctaatgtgacactggctacaatgaatcttctcttcatcgggctgaatgaaagattcaagaaccatcttcaaggtgcatggtgggaattatcaacctcagggatactcattttaactcaggcgtgtcctgctttgtaacattccattgttgggagagggcaggacaggtgtgttcttctgtgggcaggagtcatgtcactgtcctacatatgtaagagttgggaaggtgacgatttttgacacatccaggaactcttactctagttagaatttgtaccagatccaaggtgaaaaccccaataagcaactgaatttagagtttaaaaatgaatgactttatgctacatctgtggttatcaaattatataggttgttgagaagcagaacgctgtttgtagtaagaaatctttgtggaaccccagtgtgtgaagtaaattgtatgttattaaatttatttaaggttaaatttatggcatttacttaataatatatgaggtggtgaaaatgcaaattaacaaattggtaatttccaaggtagaaaaattaggtgttgaatgaatgtatatgttggtttattatagttttatatatatatagagagagtgttttgtttttgagtcagggtcttgctctattacccaggctggagtgcagtggtgcagtcatgactcactgtagcctctgtctcccaggctcaagtgatcctctcacctcagcctccccaggagctgggagtactggtgcgtgcctccactcccagctaatttttgtattttttcatagagatggggtttcaccattttgcccaggctggtctcaaacttctgggctcaagagattcgcccgcctcggcctcccaaagtgctgggaataggcatgagccgtcacgcctggcctaaaaaatatttttaaaatgatctttgaattaaatattcgtagaatttctaatgtatctctttgagacctaggaggttgatggaacagaactgctgttaagtcctttgggtttcaagtctagaattttttaaaggcaaatatcagctcattcttattttagattgaccttatcaggcatggattctggtctcatctactttatggtataaatgctccaaggtagggggtttggtatatattttaagcccggcttttttttttttttttttttttttttttttaatgtgagaagcagaatgtgcttctagaaactggttttaaagagatgagctgagaaagaaatgtggaatggagtatatttgaggaggacaaaacataacttcacttttgaacagaaatcactctagcttgccagcatgggatgtaaaccaagagagtagaaatatacccatcttattttaagttgggtttatggcatcgctcatatatgtaaaagcactacaaactctttaaagaaaattgggaaactacagagaagtcaaagaaaaaaaaaagtaacccatatttctattgcccaggtataatccttgttaatattttggtttggtctcctctttttttcccccaatatagttgtaaataaatgatgtctttcagagttgacatttatcctgtagcttgaatggcatgtaaatgccagttgtatattttttcatgaagtgtaggtttggaatacactagagttagctatatgcttgaatgctgatcactggattctgagactgactactgagtctacctttttaatcaagcctaacatgaatgggctccaaaaagtaatgaatgtaattgtactttttgatgtgcctctgcacttggcttggtgagtcatcataaatagctgttaaatatgtgactttacagattttgatatgttcagattgtaaaaaatgaatagtttatttcattaattgatgggcagtcaagaatctccctcc

SEQ ID NO: 22 - protein, 275 aa, Homo sapiens [sequence omitted]

SEQ ID NO: 23 - DNA, 957 bp, Homo sapiens
tgaagtatctctgtttaatgtcatatatctgagatgttctgtggagccagaattcaaaacccagatacgcaggaggacacattcttgatcggtattttattctattatttttattagttccaatccttatgactctgtttaaaatgagtatctgcattattgtgcaaacacttctgagatctcatcacatacctgatcccatttaacttcagtctatccctccattactttttgtggaaagtgctatctaagttggaggttctgcttgagtattcttaatttttcttctttttaatgcatacggtggtcaaagtaaatagctaacatattggcatcaaaccattgcctattgaagcaagctttgaatgaaattggtttgtcattgaccactgtaagaaactcatttgtaaagataatactgaaaaacatcctgactcttatgtatgcttgcctgtctctgaactccacctctatcagcatactcaatacattgcctctttccaacatttatctcctatttcaggagaaagttttgtgggagcgtctaccacgttgcaaagattcaacatttctcttaaaaataggagtttcttttagatataagcaatgaaatttcaagcaacaatattacttctctcatgtcctttgcttttttaagatctgaacctcaagattcaaatggattttcattgaaattcaccacgatcccctctgcagctgtggtctgaaagtaccatttctgcatttattttagcccatggaataactgtgctgagaaaccacagagtcaatcagattcaaaatgttaaaatccttcctgcttggagttttccgtcttcacatcaaagcatttcatgcccgtcagcaactttttaatgcatttgctcatggtttgcagaatttccatttaaagactttccttggctgacttctctgatgaggtttcctgcttgcctc

SEQ ID NO: 24 - DNA, 1542 bp, Homo sapiens
gtgtgtagtcgggtatgagaacgattgcaagcaaaagcagctgagggacgctgtccaaggagtaggctcagtagcacgaactgcaaatacttgagaagggaaaagttcagccttgtgctggaaagtggtttagcatgctggagctggttttctgcttggtagccctacaactttggcccaactacttggcctctgggactcagattcctcctctttaaaatggtgctaataatagcacccaccctctgtgaggaggatgctgtgaggacaaaatgagatcatccacataagccgtgaaccctgttcctggtaagctcctggaaagaagtctatggattatactcaacctacactccagttaaaggaacatctacacacagaggaaatgaataacatgaagtgaagtcttcatctccattcccaacagtccccattctacttgcagaaaggttgcttacactgaaaatcagtttattttcccctggtgcaaagaacagtcgtttctccaaaactgaagctggaaattatctgaaatatcaggtcctccggaaaagggacgtgaagccccctttgtaatttctgcattagcgtgctctcctggcaagcaggaaacctcatcagagaagtcagccaaggaaagtctttaaatggaaattgtgcaaacgaggagcaaatgcattaaaaagttgctgacgggcatgaaatgctttgatgtgaagacggaaaactccaagcaggaaggattttaacattttgaatctgattgactctgtggtttctcagcacagttattccatgggctaaaataaatgcagaaatggtactttcagaccacagctgcagaggggatcgtggtgaatttcaatgaaaatccatttgaatcttgaggttcagatcttaaaaaagcaaaggacatgagagaagtaatattgttgcttgaaatttcattgcttatatctaaaagaaactcctatttttaagagaaatgttgaatctttgcaacgtggtagacgctcccacaaaactttctcctgaaataggagataaatgttggaaagaggcaatgtattgagtatgctgatagaggtggagttcagagacaggcaagcatacataagagtcaggatgtttttcagtattatctttacaaatgagtttcttacagtggtcaatgacaaaccaatttcattcaaagcttgcttcaataggcaatggtttgatgccaatatgttagctatttactttgaccaccgtatgcattaaaaagaagaaaaattaagaatactcaagcagaacctccaacttagatagcactttccacaaaaagtaatggagggatagactgaagttaaatgggatcaggtatgtgatgagatctcagaagtgtttgcacaataatgcagatactcattttaaacagagtcataaggattggaactaataaaaataatagaataaaataccgatcaagaatgtgtcctcctgcgtatctgggttttgaattctggctccacagaacttgtcagatatatgacattaaac

SEQ ID NO: 25 - DNA, 1474 bp, Homo sapiens
gtgtgtagtcgggtatgagaacgattgcaagcaaaagcagctgagggacgctgtccaaggagtaggctcagtagcacgaactgcaaatacttgagaagggaaaagttcagccttgtgctggaaagtggtttagcatgctggagctggttttctgcttggtagccctacaactttggcccaactacttggcctctgggactcagattcctcctctttaaaatggtgctaataatagcacccaccctctgtgaggaggatgctgtgaggacaaaatgagatcatccacataagccgtgaaccctgttcctggtaaggaaatgaataacatgaagtgaagtcttcatctccattcccaacagtccccattctacttgcagaaaggttgcttacactgaaaatcagtttattttcccctggtgcaaagaacagtcgtttctccaaaactgaagctggaaattatctgaaatatcaggtcctccggaaaagggacgtgaagccccctttgtaatttctgcattagcgtgctctcctggcaagcaggaaacctcatcagagaagtcagccaaggaaagtctttaaatggaaattgtgcaaacgaggagcaaatgcattaaaaagttgctgacgggcatgaaatgctttgatgtgaagacggaaaactccaagcaggaaggattttaacattttgaatctgattgactctgtggtttctcagcacagttattccatgggctaaaataaatgcagaaatggtactttcagaccacagctgcagaggggatcgtggtgaatttcaatgaaaatccatttgaatcttgaggttcagatcttaaaaaagcaaaggacatgagagaagtaatattgttgcttgaaatttcattgcttatatctaaaagaaactcctatttttaagagaaatgttgaatctttgcaacgtggtagacgctcccacaaaactttctcctgaaataggagataaatgttggaaagaggcaatgtattgagtatgctgatagaggtggagttcagagacaggcaagcatacataagagtcaggatgtttttcagtattatctttacaaatgagtttcttacagtggtcaatgacaaaccaatttcattcaaagcttgcttcaataggcaatggtttgatgccaatatgttagctatttactttgaccaccgtatgcattaaaaagaagaaaaattaagaatactcaagcagaacctccaacttagatagcactttccacaaaaagtaatggagggatagactgaagttaaatgggatcaggtatgtgatgagatctcagaagtgtttgcacaataatgcagatactcattttaaacagagtcataaggattggaactaataaaaataatagaataaaataccgatcaagaatgtgtcctcctgcgtatctgggttttgaattctggctccacagaacttgtcagatatatgacattaaac

SEQ ID NO: 26 - DNA, 3828 bp, Homo sapiens
cgactccttagagcatggcatggctcagaggtgctggtaaaactgatgggggtttttgctgtccctcccctcagcgccgacaccatgtggatccaggttcggaccatggacgggaggcagacccacacggtggactcgctgtccaggctgaccaaggtggaggagctgaggcggaagatccaggagctgttccacgtggagccaggcctgcagaggctgttctacaggggcaaacagatggaggacggccataccctcttcgactacgaggtccgcctgaatgacaccatccagctcctggtccgccagagcctcgtgctcccccacagcaccaaggagcgggactccgagctctccgacaccgactccggctgctgcctgggccagagtgagtcagacaagtcctccacccacggcgaggcggccgccgagactgacagcaggccagccgatgaggacatgtgggatgagacggaattggggctgtacaaggtcaatgagtacgtcgatgctcgggacacgaacatgggggcgtggtttgaggcgcaggtggtcagggtgacgcggaaggccccctcccgggacgagccctgcagctccacgtccaggccggcgctggaggaggacgtcatttaccacgtgaaatacgacgactacccggagaacggcgtggtccagatgaactccagggacgtccgagcgcgcgcccgcaccatcatcaagtggcaggacctggaggtgggccaggtggtcatgctcaactacaaccccgacaaccccaaggagcggggcttctggtacgacgcggagatctccaggaagcgcgagaccaggacggcgcgggaactctacgccaacgtggtgctgggggatgattctctgaacgactgtcggatcatcttcgtggacgaagtcttcaagattgagcggccgggtgaagggagccccatggttgacaaccccatgagacggaagagcgggccgtcctgcaagcactgcaaggacgacgtgaacagactctgccgggtctgcgcctgccacctgtgcgggggccggcaggaccccgacaagcagctcatgtgcgatgagtgcgacatggccttccacatctactgcctggacccgcccctcagcagtgttcccagcgaggacgagtggtactgccctgagtgccggaatgatgccagcgaggtggtactggcgggagagcggctgagagagagcaagaagaaggcgaagatggcctcggccacatcgtcctcacagcgggactggggcaagggcatggcctgtgtgggccgcaccaaggaatgtaccatcgtcccgtccaaccactacggacccatcccggggatccccgtgggcaccatgtggcggttccgagtccaggtcagcgagtcgggtgtccatcggccccacgtggctggcatacacggccggagcaacgacggagcgtactccctagtcctggcggggggctatgaggatgacgtggaccatgggaattttttcacatacacgggtagtggtggtcgagatctttccggcaacaagaggaccgcggaacagtcttgtgatcagaaactcaccaacaccaacagggcgctggctctcaactgctttgctcccatcaatgaccaagaaggggccgaggccaaggactggcggtcggggaagccggtcagggtggtgcgcaatgtcaagggtggcaagaatagcaagtacgcccccgctgagggcaaccgctacgatggcatctacaaggttgtgaaatactggcccgagaaggggaagtccgggtttctcgtgtggcgctaccttctgcggagggacgatgatgagcctggcccttggacgaaggaggggaaggaccggatcaagaagctggggctgaccatgcagtatccagaaggctacctggaagccctggccaaccgagagcgagagaaggagaacagcaagagggaggaggaggagcagcaggaggggggcttcgcgtcccccaggacgggcaagggcaagtggaagcggaagtcggcaggaggtggcccgagcagggccgggtccccgcgccggacatccaagaaaaccaaggtggagccctacagtctcacggcccagcagagcagcctcatcagagaggacaagagcaacgccaagctgtggaatgaggtcctggcgtcactcaaggaccggccggcgagcggcagcccgttccagttgttcctgagtaaagtggaggagacgttccagtgtatctgctgtcaggagctggtgttccggcccatcacgaccgtgtgccagcacaacgtgtgcaaggactgcctggacagatcctttcgggcacaggtgttcagctgccctgcctgccgctacgacctgggccgcagctatgccatgcaggtgaaccagcctctgcagaccgtcctcaaccagctcttccccggctacggcaatggccggtgatctccaagcacttctcgacaggcgttttgctgaaaacgtgtcggagggctcgttcatcggcactgattttgttcttagtgggcttaacttaaacaggtagtgtttcctccgttccctaaaaaggtttgtcttcctttttttttatttttatttttcaaatctatacattttcaggaatttatgtattctggctaaaagttggacttctcagtattgtgtttagttctttgaaaacataaaagcctgcaatttctcgacaaaacaacacaagattttttaaagatggaatcagaaactacgtggtgtggaggctgttgatgtttctggtgtcaagttctcagaagttgctgccaccaactctttaagaaggcgacaggatcagtccttctctagggttctggcccccaaggtcagagcaagcatcttcctgacagcattttgtcatctaaagtccagtgacatggttccccgtggtggcccgtggcagcccgtggcatggcgtggctcagctgtctgttgaagttgttgcaaggaaaagaggaaacatctcgggcctagttcaaacctttgcctcaaagccatcccccaccagactgcttagcgtctgagatccgcgtgaaaagtcctctgcccacgagagcagggagttggggccacgcagaaatggcctcaaggggactctgctccacgtggggccaggcgtgtgactgacgctgtccgacgaaggcggccacggacggacgccagcacacgaagtcacgtgcaagtgcctttgattcgttccttctttctaaagacgacagtctttgttgttagcactgaattattgaaaatgtcaaccagattctagaaactgcggtcatccagttcttcctgacaccggatgggtgcttgggaaccgtttgagccttatagatcatttacattcaatttttttaactcagcaagtgagaacttacaagagggtttttttttaatttttttttctcttaatgaacacattttctaaatgaattttttttgtagttactgtatatgtaccaagaaagatataacgttagggtttggttgtttttgtttttgtattttttttcttttgaaagggtttgttaatttttctaattttaccaaagtttgcagcctatacctcaataaaacagggatattttaaatcacatacctgcagacaaactggagcaatgttatttttaaagggtttttttcacctccttattcttagattattaatgtattagggaagaatgagacaattttgtgtaggctttttctaaagtccagtactttgtccagattttagattctcagaataaatgtttttcacagattgaaaaaaaaaaaaaa

SEQ ID NO: 27 - protein, 793 aa, Homo sapiens
MWIQVRTMDGRQTHTVDSLSRLTKVEELRRKIQELFHVEPGLQRLFYRGKQMEDGHTLFDYEVRLNDTIQLLVRQSLVLPHSTKERDSELSDTDSGCCLGQSESDKSSTHGEAAAETDSRPADEDMWDETELGLYKVNEYVDARDTNMGAWFEAQVVRVTRKAPSRDEPCSSTSRPALEEDVIYHVKYDDYPENGVVQMNSRDVRARARTIIKWQDLEVGQVVMLNYNPDNPKERGFWYDAEISRKRETRTARELYANVVLGDDSLNDCRIIFVDEVFKIERPGEGSPMVDNPMRRKSGPSCKHCKDDVNRLCRVCACHLCGGRQDPDKQLMCDECDMAFHIYCLDPPLSSVPSEDEWYCPECRNDASEVVLAGERLRESKKKAKMASATSSSQRDWGKGMACVGRTKECTIVPSNHYGPIPGIPVGTMWRFRVQVSESGVHRPHVAGIHGRSNDGAYSLVLAGGYEDDVDHGNFFTYTGSGGRDLSGNKRTAEQSCDQKLTNTNRALALNCFAPINDQEGAEAKDWRSGKPVRVVRNVKGGKNSKYAPAEGNRYDGIYKVVKYWPEKGKSGFLVWRYLLRRDDDEPGPWTKEGKDRIKKLGLTMQYPEGYLEALANREREKENSKREEEEQQEGGFASPRTGKGKWKRKSAGGGPSRAGSPRRTSKKTKVEPYSLTAQQSSLIREDKSNAKLWNEVLASLKDRPASGSPFQLFLSKVEETFQCICCQELVFRPITTVCQHNVCKDCLDRSFRAQVFSCPACRYDLGRSYAMQVNQPLQTVLNQLFPGYGNGR

SEQ ID NO: 28 - DNA, 1279 bp, Homo sapiens
agaaactcagagaccaagtccattgagagactgaggggaaagagaggagagaaagaaaaagagagtgggaacagtaaagagaaaggaagacaacctccagagaaagcccccggagacgtctctctgcagagaggcggcagcacccggctcacctgcgaagcgcctgggaagcgagtgcccctaacatgcggctgccgctgcttgtgtccgcgggagtcctgctggtggctctcctgccctgcccgccatgcagggcgctcctgagccgcgggccggtcccgggagctcggcaggcgccgcagcaccctcagcccttggatttcttccagccgccgccgcagtccgagcagccccagcagccgcaggctcggccggtcctgctccgcatgggagaggagtacttcctccgcctggggaacctcaacaagagcccggccgctcccctttcgcccgcctcctcgctcctcgccggaggcagcggcagccgcccttcgccggaacaggcgaccgccaactttttccgcgtgttgctgcagcagctgctgctgcctcggcgctcgctcgacagccccgcggctctcgcggagcgcggcgctaggaatgccctcggcggccaccaggaggcaccggagagagaaaggcggtccgaggagcctcccatctccctggatctcaccttccacctcctccgggaagtcttggaaatggccagggccgagcagttagcacagcaagctcacagcaacaggaaactcatggagattattgggaaataaaacggtgcgtttggccaaaaagaatctgcatttagcacaaaaaaaatttaaaaaaatacagtattctgtaccatagcgctgctcttatgccatttgtttatttttatatagcttgaaacatagagggagagagggagagagcctataccccttacttagcatgcacaaagtgtattcacgtgcagcagcaacacaatgttattcgttttgtctacgtttagtttccgtttccaggtgtttatagtggtgttttaaagagaatgtagacctgtgagaaaacgttttgtttgaaaaagcagacagaagtcactcaattgtttttgttgtggtctgagccaaagagaatgccattctcttgggtgggtaagactaaatctgtaagctctttgaaacaactttctcttgtaaacgtttcagtaataaaacatctttccagtccttggtcagtttggttgtgtaagagaatgttgaatacttatatttttaataaaagttgcaaaggt

SEQ ID NO: 29 - protein, 196 aa, Homo sapiens
MRLPLLVSAGVLLVALLPCPPCRALLSRGPVPGARQAPQHPQPLDFFQPPPQSEQPQQPQARPVLLRMGEEYFLRLGNLNKSPAAPLSPASSLLAGGSGSRPSPEQATANFFRVLLQQLLLPRRSLDSPAALAERGARNALGGHQEAPERERRSEEPPISLDLTFHLLREVLEMARAEQLAQQAHSNRKLMEIIGK

SEQ ID NO: 30 - DNA, 598 bp, Homo sapiens
atttcttgagatggctcctcttggaactatgcatctctcctgatacttggatgcttttcctctgactgatgaagatcctgaataccaaagagggccgctgaaagggctctaggagtacaccttctaggaaccctaagccagagagaggcttcactacatcatgcttcctgacatctctccctttgaagagcagtcagactcctgctttgctcttcagacttaatttgggggtttaacaggtgaggttgctgggggaactcttttacaacatctctctgaaagaatccgggctgccagtttcatttggtttgggtgtcagtagcatgatggaaagacaaaaaaacacaacttgacatctgcagaaatgggttcaaattttacctgcaactcaccaattctgtggccttggttcagcaattaaactccctaaaattcagttttttctttgtaaaatggggttatgaacagtacctacttcaaaatgtgtttgtgaagattaaaaaagttaacataaagagtttagaagagtgtctggcatattgtgctcaataagtgtttatttatttattgctgaataaaccagtaatttaattagtat

SEQ ID NO: 31 - DNA, 2990 bp, Homo sapiens
cacctcagccccaaccccaaccccagccgcatcccctgccccagctgacgggtcaaagcctcaggagagtgtggctctccccaggcgctaccaggaggggcaggtctcagccagctggggaaaccttattgccatggttcttagaagccaccccttccccaggcaagacaggccccaagggagtgtcccgagggcggttcccgggagccccgtgggtcccagcacttccacacactctgaggacagacacggcccctcttcttcagtggggacagtcatagggacaggtacagggggcctggttgaggctggaggtcagccacagccaagaagctccgagaccaacggatcgcccagcccagaccctcccccaggcctaagaggagagggaaccagggagaaaagtctagacccgctgccccaagccgcgatgcccaggggccccgcacagccccccgcgcagaggccgcctggccccgcggcctcctcctctgcgaggcgctcacagccggtaccccagctacggaaacgcagcaggtgcgaaatcgccccgagctcggagcaggaggtcaggccggccgcctcgggggaccctcaaggggaggcgccgggggaggggggcagccctgccggccgcagcggggcgctcacggaaaagcaggaggaggcccggaagctcatggtgtttctgcagaggcccgggggttggggggtggtggaggggccccggaagcccagctcccgggccctggagcccgccacggcggcagccctgcggcggcggctggacctgggcagttgcctggacgtgctggcctttgcccagcagcacggagagcccggcctggcgcaggagacctacgcgctgatgagcgacaacctgctgcgagtgctgggagacccgtgcctctaccgccggctgagcgcggccgaccgcgagcgcatcctcagcctgcggaccggccggggccgggcggtgctgggcgtcctcgtactgcccagcctctaccaggggggccgctcagggctccccaggggccctcgtggcgaggagcctcctgcggcggcccctgtgtccctgcctctacctgcgcacctgcatgtgttcaacccccgggagaacacctggcggcccctgacccaggtgcccgaggaggccccgcttcggggctgcggtctctgcaccatgcacaactacctgtttctggcggggggcatccgtggctccggtgccaaggccgtctgctccaacgaggtcttctgctacaaccctctgaccaacatctggagccaggttcggcccatgcagcaggcccgagcccagctcaagctggtggccctggacgggctgctctatgccatcggtggcgaatgcctgtacagcatggagtgctacgacccgcgaacagacgcctggaccccacgcgcgccactccccgcaggcaccttccctgtggcccacgaggctgtggcctgccgtggggacatctacgtcaccgggggtcacctcttctaccgcctgctcaggtacagccccgtgaaggatgcttgggacgagtgcccatacagtgccagccaccggcgttccagcgacatcgtggcactggggggcttcctgtaccgcttcgacctgctgcggggcgtgggcgccgccgtgatgcgctacaacacagtgaccggctcctggagcagggctgcctccctgcccctgcccgcccccgccccactgcactgcaccaccctgggcaacaccatttactgcctcaacccccaggtcactgccaccttcacggtctctggggggactgcccagttccaggccaaggagctgcagcccttccccttggggagcaccggggtcctcagtccattcatcctgactctgccccctgaggaccggctgcagacctcactctgagtggcaggcagagaaccaaagctgcttcgctgctctccagggagaccctcctgggatgggcctgagaggccggggctcagggaaggggctgggatcggaacttcctgctcttgtttctggacaactttccccttctgctttaaaggttgtcgattattttgaagcccagactccctcagcctctttctgcccctcactccacacccagactgtttcctgactcaattccgtacctacttacagaccctctcagcttgctgacacccccctgtctgtgggactccctattccctagagccagggactgatgcgtctccacagacaaggacttggctcgctggagctctgctgagccgagagaggagggggtagaaaacattcacacttcctatgctctgtcagcaggacagggagcaaaaacgtccccaggcaacgccctcgcctctgggactttctgcctgtcctaaggcctccccaggtaccaaccccgtagctatctgggtctgtttggcactgtggattctcaagggcctagaacccttgcctctgaaactggtccgctggtgcagccctgctgtctgcagctcctgcccatacccccagcccacaccaggccaggcccactccgggctcaccaccctctgcagccttgtggggctctcccagcccctccagaagcccaccccacttctcgccaacccccgatctctaaatgaggcctgagcgtcaccctagttctgcccctttttagctgtgtagacttggacgagacatttgacttccctttctccttgtctataaaatgtggacagtggacgtctgtcacccaagagagttgtgggagacaagatcacagctatgagcacctcgcacggtgtccaggatgcacagcacaatccatgatgcgttttctccccttacgcactttgaaacccatgctagaaaagtgaatacatctgactgtgctccactccaacctccagcctggatgtccctgtctgggccctttttctgttttttattctatgttcagcaccactggcaccaaatacattttaattcaccgaaagca

SEQ ID NO: 32 - protein, 495 aa, Homo sapiens
MPRGPAQPPAQRPPGPAASSSARRSQPVPQLRKRSRCEIAPSSEQEVRPAASGDPQGEAPGEGGSPAGRSGALTEKQEEARKLMVFLQRPGGWGVVEGPRKPSSRALEPATAAALRRRLDLGSCLDVLAFAQQHGEPGLAQETYALMSDNLLRVLGDPCLYRRLSAADRERILSLRTGRGRAVLGVLVLPSLYQGGRSGLPRGPRGEEPPAAAPVSLPLPAHLHVFNPRENTWRPLTQVPEEAPLRGCGLCTMHNYLFLAGGIRGSGAKAVCSNEVFCYNPLTNIWSQVRPMQQARAQLKLVALDGLLYAIGGECLYSMECYDPRTDAWTPRAPLPAGTFPVAHEAVACRGDIYVTGGHLFYRLLRYSPVKDAWDECPYSASHRRSSDIVALGGFLYRFDLLRGVGAAVMRYNTVTGSWSRAASLPLPAPAPLHCTTLGNTIYCLNPQVTATFTVSGGTAQFQAKELQPFPLGSTGVLSPFILTLPPEDRLQTSL

SEQ ID NO: 33 - DNA, 824 bp, Homo sapiens
cctctgtctaaccttacatgaaaaaacccgtttccaacgaaggcctctaaaaggccaagaaatccccttgcagactttacaaacagagtgtttcctaactgctctatgaacagaaaggttaaactctgtgagttgaaccaacacatcacaacgcagtttgtgggaatgattctgtctagttttgaaacgaagatatttccttttctgccgttgaccttaaagcgcttgaaatctacacttgcaaattgcacaaatagagtgtttcaaatctgctctgtctaagggaacgttcaactctgtgagttgaatgcacacaacacaaggaagttactgggaattcttctgtctagccttacatgaaagaaaacccgtttccaacgaaggcctctaagtggtcaaaatatccacgtgcagactttacaaacagagtgtttccaaactgctgaatgaaaagaaaagtaaactctgagagttgaacgcacacatcgcagagcagtttctgagaatgattctgtctagtttttatacgaagatatttccttttctgcctttggcctcaaagcgcttgaaatctccacttgcaaattccacaaaaagagtgtttcaaatctgctctgtctaaaggaaggttcaactctgtgagttgaatacacacaacacaaagaagttactgagaattcttctgtctagcattatatgaagaaatcccgtttccaacgaaggcatctaagaggtccaaatatccacttgcagactttacaaacagagggtttccagaatggctgtatgaaaagaaaggttaaactctgtgagttaaacacaca

SEQ ID NO: 34 - DNA, 2253 bp, Homo sapiens
ggaagacttgggtccttgggtcgcaggtgggagccgacgggtgggtagaccgtgggggatatctcagtggcggacgaggacggcggggacaaggggcggctggtcggagtggcggagcgtcaagtcccctgtcggttcctccgtccctgagtgtccttggcgctgccttgtgcccgcccagcgcctttgcatccgctcctgggcaccgaggcgccctgtaggatactgcttgttacttattacagctagaggcatcatggaccgatctaaagaaaactgcatttcaggacctgttaaggctacagctccagttggaggtccaaaacgtgttctcgtgactcagcaaattccttgtcagaatccattacctgtaaatagtggccaggctcagcgggtcttgtgtccttcaaattcttcccagcgcgttcctttgcaagcacaaaagcttgtctccagtcacaagccggttcagaatcagaagcagaagcaattgcaggcaaccagtgtacctcatcctgtctccaggccactgaataacacccaaaagagcaagcagcccctgccatcggcacctgaaaataatcctgaggaggaactggcatcaaaacagaaaaatgaagaatcaaaaaagaggcagtgggctttggaagactttgaaattggtcgccctctgggtaaaggaaagtttggtaatgtttatttggcaagagaaaagcaaagcaagtttattctggctcttaaagtgttatttaaagctcagctggagaaagccggagtggagcatcagctcagaagagaagtagaaatacagtcccaccttcggcatcctaatattcttagactgtatggttatttccatgatgctaccagagtctacctaattctggaatatgcaccacttggaacagtttatagagaacttcagaaactttcaaagtttgatgagcagagaactgctacttatataacagaattggcaaatgccctgtcttactgtcattcgaagagagttattcatagagacattaagccagagaacttacttcttggatcagctggagagcttaaaattgcagattttgggtggtcagtacatgctccatcttccaggaggaccactctctgtggcaccctggactacctgccccctgaaatgattgaaggtcggatgcatgatgagaaggtggatctctggagccttggagttctttgctatgaatttttagttgggaagcctccttttgaggcaaacacataccaagagacctacaaaagaatatcacgggttgaattcacattccctgactttgtaacagagggagccagggacctcatttcaagactgttgaagcataatcccagccagaggccaatgctcagagaagtacttgaacacccctggatcacagcaaattcatcaaaaccatcaaattgccaaaacaaagaatcagctagcaaacagtcttaggaatcgtgcagggggagaaatccttgagccagggctgccatataacctgacaggaacatgctactgaagtttattttaccattgactgctgccctcaatctagaacgctacacaagaaatatttgttttactcagcaggtgtgccttaacctccctattcagaaagctccacatcaataaacatgacactctgaagtgaaagtagccacgagaattgtgctacttatactggttcataatctggaggcaaggttcgactgcagccgccccgtcagcctgtgctaggcatggtgtcttcacaggaggcaaatccagagcctggctgtggggaaagtgaccactctgccctgaccccgatcagttaaggagctgtgcaataaccttcctagtacctgagtgagtgtgtaacttattgggttggcgaagcctggtaaagctgttggaatgagtatgtgattctttttaagtatgaaaataaagatatatgtacagacttgtattttttctctggtggcattcctttaggaatgctgtgtgtctgtccggcaccccggtaggcctgattgggtttctagtcctccttaaccacttatctcccatatgagagtgtgaaaaataggaacacgtgctctacctccatttagggatttgcttgggatacagaagaggccatgtgtctcagagctgttaagggcttatttttttaaaacattggagtcatagcatgtgtgtaaactttaaatatgcaaataaataagtatctatgtctaaaaaaaaaaaaaaaa

SEQ ID NO: 35 - protein, 403 aa, Homo sapiens
MDRSKENCISGPVKATAPVGGPKRVLVTQQIPCQNPLPVNSGQAQRVLCPSNSSQRVPLQAQKLVSSHKPVQNQKQKQLQATSVPHPVSRPLNNTQKSKQPLPSAPENNPEEELASKQKNEESKKRQWALEDFEIGRPLGKGKFGNVYLAREKQSKFILALKVLFKAQLEKAGVEHQLRREVEIQSHLRHPNILRLYGYFHDATRVYLILEYAPLGTVYRELQKLSKFDEQRTATYITELANALSYCHSKRVIHRDIKPENLLLGSAGELKIADFGWSVHAPSSRRTTLCGTLDYLPPEMIEGRMHDEKVDLWSLGVLCYEFLVGKPPFEANTYQETYKRISRVEFTFPDFVTEGARDLISRLLKHNPSQRPMLREVLEHPWITANSSKPSNCQNKESASKQS

SEQ ID NO: 36 - DNA, 1126 bp, Homo sapiens
cggcacgaggacagaatcaggtgatggtccagaattaagagctgtcacctgtgtcattcactcacaatggaagaaatgaagaagactgccatccggctgcccaaaggcaaacagaagcctataaagacggaatggaattcccggtgtgtccttttcacctacttccaaggggacatcagcagcgtagtggatgaacacttctccagagctctgagcaatatcaagagcccccaggaattgaccccctcgagtcagagtgaaggtgtgatgctgaaaaacgatgatagcatgtctccaaatcagtggcgttactcgtctccatggacaaagccacaaccagaagtacctgtcacaaaccgtgccgccaactgcaacttgcatgtgcctggtcccatggctgtgaatcagttctcaccgtccctggctaggagggcctctgttcggcctggggagctgtggcatttctcctccctggcgggcaccagctccttagagcctggctactctcatcccttccccgctcggcacctggttccagagccccagcctgatgggaaacgtgagcctctcctaagtctcctccagcaagacagatgcctagcccgtcctcaggaatctgccgccagggagaatggcaaccctggccagatagctggaagcacagggttgctcttcaacctgcctcccggctcagttcactataagaaactatatgtatctcgtggatctgccagtaccagccttccaaatgaaactctttcagagttagagacacctgggaaatactcacttacaccaccaaaccactggggccacccacatcgatacctgcagcatctttagtcaagttggaggagaaagacaacacttggtctaagacacggcagcaagacatccctgcatattgttccagataaaaatgaaagctgctcacacccacttgcctccccaatctgttaaacagcttcgtgtctagtatgagctcagtacttgccctgtgaaaatcccagaagcccccgctgtcaatgttccccatccacaccctgcttgctcctgtgtaacagctcagatgatgaataataataaaactgtacttttttggaaaaaaaaaaaaaaaaaaaaaaaa

SEQ ID NO: 37 - protein, 262 aa, Homo sapiens
MEEMKKTAIRLPKGKQKPIKTEWNSRCVLFTYFQGDISSVVDEHFSRALSNIKSPQELTPPSSQSEGVMLKNDDSMSPNQWRYSSPWTKPQPEVPVTNRAANCNLHVPGPMAVNQFSPSLAARRASVRPGELWHFSSLAGTSSLEPGYSHPFPARHLVPEPQPDGKREPLLSLLQQDRCLARRPQESAARENGNPGQIAGSTGLLFNLPPGSVHYKKLYVSRGSASTSLPNETLSELETPGKYYSLTPPNHWGHPHRYLQHL

SEQ ID NO: 38 - DNA, 1848 bp, Homo sapiens
aggaaaccaaggcaagctccccctgtcaaagcaccttggcccataagaagaaaagggggagccccagatgtgatgagcgcttccaggcttcaggctcagaaggcgcccccagctctcctgtaactcagaggccagtgtgatgggagttcctccactcagcacacttcccctgtaaacacgcctgtggtgggcaaaagggctttggaacggttgcttgtcttttctctcctgcgtaatttccactttcattcatgataatgtcgaacacgcacaaagctcggctggaacgccgggtcactggctcaaccaaccggtggcgtttgcccaaacagcctttctctggggacctgctctcactttcccagatgtgcaaggctctgagcatagactttgaggaagctttgaggaacccagacaggttatgcatttcacaaatccagaagtttttctttgagaatttcaagaacaaggacatccaaagtggggaagcagatgtgattctcgagtgcctgggcttcaaatgggagctccatcagccccggctttttcagtctgagaccttggccaagctctacctgaaagccctggcgcagggcaccacacaccccctgagggagctggaggagcttctgcgagctcaatcacctaagaagaccaaagaaaaatcccctgcaaagaggatcatcatttccttgaagatcaatgacccactggtcactaaagtcgccttcgccacggccctgaagaacctctacatgagtgaggtggagattaacttggaagacctactgggagtgctggcttccgcccacatcctccagttcagtggcctgtttcaaaggtgcgtggatgtgatgatagccagactcaagccaagcaccatcaagaaattctacgaggccggctgcaagtacaaggaagagcagctcaccaccggctgcgagaagtggctggaaatgaacttggttcctctaggggggacgcagatccacctccacaaaatcccacaggacctgctccacaaagtgctgaagtcccccaggttatttacctttagtgaattccatcttctgaaaacaatgcttttgtgggtcttcttgcaactgaactacaagattcaggcaattccgacttatgaaaccgtgatgacattttttaagagctttcctgagaactgttgctttctggaccgggacataggacggagcttgaggccgctcttcctctgcttgcgtctgcacggcatcaccaaaggcaaggatctggaggtgctgcggcaccttaacttcttcccagagtcatggctcgaccaggttacagtcaaccattaccacgcactggagaatgggggcgacatggtccacctgaaagatcttaacacccaggctgtgagatttgggctgctctttaaccaggagaatacaacttattcgaaaacgattgctctatatggattcttctttaagataaagggactcaaacatgatactacctcttatagtttttacatgcagagaataaagcacacagacctggaatctccctctgcggtctacgagcacaaccacgtcagcctgcgagcggcacgcctggtgaagtatgagatcagagcagaggccctggttgacggcaagtggcaggagttcaggacaaaccagatcaagcagaagtttgggttgaccacgtcatcctgcaaaagccataccttgaaaatccaaactgtgggcatcccaatctatgtaagttttgcattcatcttcccagcatcttgacagtttccagaagaatctatgggattttccccccactggtctgcataaaagaaaataaaatgacataaaagggagc

SEQ ID NO: 39 - protein, 506 aa, Homo sapiens
MIMSNTHKARLERRVTGSTNRWRLPKQPFSGDLLSLSQMCKALSIDFEEALRNPDRLCISQIQKFFFENFKNKDIQSGEADVILECLGFKWELHQPRLFQSETLAKLYLKALAQGTTHPLRELEELLRAQSPKKTKEKSPAKRIIISLKINDPLVTKVAFATALKNLYMSEVEINLEDLLGVLASAHILQFSGLFQRCVDVMIARLKPSTIKKFYEAGCKYKEEQLTTGCEKWLEMNLVPLGGTQIHLHKIPQDLLHKVLKSPRLFTFSEFHLLKTMLLWVFLQLNYKIQAIPTYETVMTFFKSFPENCCFLDRDIGRSLRPLFLCLRLHGITKGKDLEVLRHLNFFPESWLDQVTVNHYHALENGGDMVHLKDLNTQAVRFGLLFNQENTTYSKTIALYGFFFKIKGLKHDTTSYSFYMQRIKHTDLESPSAVYEHNHVSLRAARLVKYEIRAEALVDGKWQEFRTNQIKQKFGLTTSSCKSHTLKIQTVGIPIYVSFAFIFPAS

SEQ ID NO: 40 - DNA, 1628 bp, Homo sapiens
ggcacgaggattgctcaggacagcggtaaatcacttcttggaggtgccctgcacgccggtcctgggagcaggcggcctcccgggggtgcgggagccccactcctccgtggtgtgttccatttgcttcccacatctggaggagctgacgtgccagcctcccccagcaccacccagggacgggaggcatgagccggtcaaggcacctgggcaaaatccggaagcgtctggaagatgtcaagagccagtgggtccggccagccagggctgactttagtgacaacgagagtgcccggctggccacggacgccctcttggatgggggttctgaagcctactggcgggtgctcagccaggaaggcgaggtggacttcttgtcctcggtggaggcccagtacatccaggcccaggccagggagcccccgtgtcccccagacaccctgggaggggcggaagcaggccctaagggactggactccagctccctacagtccggcacctacttccctgtggcctcagagggcagcgagccggccctactgcacagctgggcctcagctgagaagccctacctgaaggaaaaatccagcgccactgtgtacttccagaccgtcaagcacaacaacatcagagacctcgtccgccgctgcatcacccggactagccagaacatttccatccggagtgtggaaggagagatatactgtgccaagtcaggcaggaaattcactggccaaatccgggagaagttcatcatctcggactggagatttgtcctgtctggatcttacagcttcacctggctctgcggacacgtgcaccggaacatcctctccaagttcacaggccaggcggtggagctgtttgacgaggagttccgccacctctacgcctcctccaagcctgtgatgggcctgaagtccccgcggctggtcgcccccgtcccgcccggagcagccccggccaatggccgccttagcagcagcagtggctccgccagtgaccgcacgtcctccaaccccttcagcggccgctcggcaggcagccaccccggtacccgaactgacggctgagatgaggttagaatgactgggcccggctgaacattccaaattggatttcaccatctgctgagaaagtttaaggaaggcaaagcttgccaggtcacagaagctcccaagcccagctttccaaaggcctcagcctgtgcctgtgtcgagctcagtcctgggagataggggagaacctgcaggcaggaacaagcccccctactcctgaccaccctccatcagcagtctcccctccgtggtcgtctttgttgacaaaggtgcagtttctcctctcctgggcacctgtaacatgtgatgcgctgcctgctgggaggttaggtcggggctgccccggcgagtggagcatgagcagaaccgccgagggtcacttctgggcagaagctttgagagcctgggtccaggttgccacatagaagcagctctccagttgaaaccctcctctgccagcctggggtcctaagcgatgagcagaatcccccactcccaccccaccaacccacaatggatatgtagtgagcaagaaataaacctttgttgtttaaaaaaaaaaaaaaaaaaaaa

SEQ ID NO: 41 - protein, 294 aa, Homo sapiens
MSRSRHLGKIRKRLEDVKSQWVRPARADFSDNESARLATDALLDGGSEAYWRVLSQEGEVDFLSSVEAQYIQAQAREPPCPPDTLGGAEAGPKGLDSSSLQSGTYFPVASEGSEPALLHSWASAEKPYLKEKSSATVYFQTVKHNNIRDLVRRCITRTSQNISIRSVEGEIYCAKSGRKFTGQIREKFIISDWRFVLSGSYSFTWLCGHVHRNILSKFTGQAVELFDEEFRHLYASSKPVMGLKSPRLVAPVPPGAAPANGRLSSSSGSASDRTSSNPFSGRSAGSHPGTRTDG

SEQ ID NO: 42 - DNA, 3265 bp, Homo sapiens
tggagagggacaggaggaaacgcagcgccagcagcatctcatctaccctccttgacacctccccgtggctccagcaagccctagaggtcagccttgcggaccaacaggaggactcccagctttcccttttcaagaggtaccccagacaccggccaccctcttccagcccctgcggccagtgcaaggaggcaccaatgctctgaggctgtcgcgtggtgcagcgtcgagcatcctcgccgagtccttctgctgcctgtcccgcctcaccccgctccatcacaccagctggccctctttgcttccttttcccagaatcgttaagccccgactcccactagcacctcgtaccaacctcgccccaccccatcctcctgccttcccgcgctccggtgtcccccgctgccatgagctcccccatcagcaagagccgctcgcttgccgccttcctgcagcagctgcgcagtccgaggcagcccccgagactggtgacatctacggcgtacacgtcccctcagccgcgagaggtgccagtctgcccgctgacagctggtggcgagactcagaacgcggccgccctgccgggccccaccagctggccactgctggcgagcctgctgcagattctctggaaagggggtctcaagaaacagcacgacaccctggtggagtaccacaagaagtatggcaagattttccgcatgaagttgggttcctttgagtcggtgcacctgggctcgccatgcctgctggaagcgctgtaccgcaccgagagcgtaccccagcggctggagatcaaaccgtggaaggcctatcgcgactaccgcaaagaaggctacgggctgctgatcctggaaggggaagactggcagcgggtccggagtgcctttcaaaagaaactaatgaaaccaggggaagtgatgaagctggacaacaaaatcaatgaggtcttggccgattttatgggcagaatagatgagctctgtgatgaaagaggccacgtcgaagacttgtacagcgaactgaacaaatggtcgtttgaaagtatctgcctcgtgttgtatgagaagagatttgggcttctccagaagaatgcaggggatgaagctgtgaacttcatcatggccatcaaaacaatgatgagcacgtttgggaggatgatggtcactccagtcgagctgcacaagagcctcaacaccaaggtctggcagggacacactctggcctgggacaccattttcaaatcagtcaaagcttgtatcgacaaccggttagagaagtattctcagcagcctagtgcagatttcctttgtgacatttatcaccagaatcggctttcaaagaaagaattgtatgctgctgtcacagagctccagctggctgcggtggaaacgacagcaaacagtctaatgtggattctctacaatttatcccgtaatccccaagtgcaacaaaagcttcttaaggaaattcaaagtgtattacctgagaatcagaggccacgggaggaagatttgaggaatatgccgtatttaaaagcctgtctgaaagaatctatgaggcttaccccgggtgtaccatttacaactcggactcttgacaaggcaacagttctgggtgaatatgctttacccaaaggaacagtgctcatgctaaatacccaggtgttgggatccagtgaagacaattttgaagattcaagtcagtttagacctgaacgttggcttcaggagaaggaaaaaattaatccttttgcgcatcttccatttggcgttggaaaaagaatgtgcattggtcgccgattagcagagcttcaactgcatttggctctttgttggattgtccgcaaatacgacatccaggccacagacaatgagcctgttgagatgctacactcaggcaccctggtgcccagccgggaactccccatcgcgttttgccagcgataatacgcctcagatggtggtatttgctaacatcatatccaactcagggaagcggactgagtgctgggatccaaggcattctacagggttcactgctggtttacacttcacctgtgtcagcaccatcttcaggtgcttagaatggcctgggagcctgttctgtcttgcatcttccatgacatgaaagggaggctggcacttgtcagtcaggtagaggttacaaaccgtttcaggccctgctaccacattcactgtttgaatctttaattcccaagaataagtttacatttcacaatgaatgacctacaacagctaaattttctggggctgggagtaatactgacaatccatttactgtagctctgcttaatgtactacttaggaaaatgtccctgcttaataatgtaagccaagctaaatgatggttaaagttatcaggcctcccatgaaattgcgttcttcctgcattgaaataaaaacattattgggaaactagagaacacctctatttttaaaaggactttaacgaagtcaaacaacttctaagactagtgattcactggggcattatttgttagaggaccttaaaattgtttattttttaaatgtgattcctttatggcattagggtaaagatgaagcaataatttttaaattgtgtatgtgcatatgaagcacagacatgcatgtgtgtgtgtgtctgtgtgtgtgtgtccgtgtatgtgtgtgtgggttctaatggtaatttgcctcagtcatttttttaatatttgcagtacttgatttaggatctgtggtgcagggcatgtttcaaagtttagtcacagcttaaaaacattcagtgtgactttaatattataaaatgatttcccatgccataatttttctgtctattaaatgggacaagtgtaaagcatgcaaaagttagagatctgttatataacatttgttttgtgatttgaactcctaggaaaaatatgatttcataaatgtaaaatgcacagaaatgcatgcaatacttataagacttaaaaattgtgtttacagatggtttatttgtgcatatttttactactgcttttcctaaatgcatactgtatataattctgtgtatttgataaatatttcttcctacattatatttttagaatatttcagaaatatacatttatgtctttatattgtaataaatatgtacatatctaggtatatgctttctctctgctgtgaaattatttttagaattataattcacgtcttgtcatatttcatctgtataccttcaaattctctgaaagtaaaaataaaagtttttaaatatt

SEQ ID NO: 43 - protein, 513 aa, Homo sapiens
MSSPISKSRSLAAFLQQLRSPRQPPRLVTSTAYTSPQPREVPVCPLTAGGETQNAAALPGPTSWPLLASLLQILWKGGLKKQHDTLVEYHKKYGKIFRMKLGSFESVHLGSPCLLEALYRTESVPQRLEIKPWKAYRDYRKEGYGLLILEGEDWQRVRSAFQKKLMKPGEVMKLDNKINEVLADFMGRIDELCDERGHVEDLYSELNKWSFESICLVLYEKRFGLLQKNAGDEAVNFIMAIKTMMSTFGRMMVTPVELHKSLNTKVWQGHTLAWDTIFKSVKACIDNRLEKYSQQPSADFLCDIYHQNRLSKKELYAAVTELQLAAVETTANSLMWILYNLSRNPQVQQKLLKEIQSVLPENQRPREEDLRNMPYLKACLKESMRLTPGVPFTTRTLDKATVLGEYALPKGTVLMLNTQVLGSSEDNFEDSSQFRPERWLQEKEKINPFAHLPFGVGKRMCIGRRLAELQLHLALCWIVRKYDIQATDNEPVEMLHSGTLVPSRELPIAFCQR

SEQ ID NO: 44 - DNA, 1223 bp, Homo sapiens
atggcgtctgcggcagcagcggaggccgagaagggatctccagttgtggtgggcctgctagttgtgggcaatatcattattctgctgtcaggcctgtccctgtttgctgagaccatatgggtgacagccgaccagtaccgtgtatacccactgatgggagtctcaggcaaggatgacgtcttcgctggtgcctggattgccatcttctgcggcttctccttcttcatggtagccagttttggtgtgggtgccgcactctgccgccgccggtccatggtcctcacgtacctggtgctcatgctcatcgtctacatcttcgagtgcgcctcctgcatcacgtcctacacccaccgtgactacatggtgtccaacccatccctgatcaccaagcagatgctgaccttctacagcgcggacaccgaccagggccaggagctgacccgcctctgggaccgcgtcatgattgagcaagaatgctgtggcacatctggtcccatggactgggtgaacttcacgtcagccttccgggcggccactccggaggtggtgttcccctggcccccactgtgctgtcgccggacgggaaacttcatccccctcaacgaggagggctgccgcctggggcacatggactacctgttcaccaagggctgcttcgaacacatcggccacgccatcgacagctacacgtggggtatctcgtggtttgggtttgccatcctgatgtggacgctcccggtcatgctgatagccatgtatttctacaccatgctctgagggacaggaggggaaggcaacatacacaccccggactcctccgcatcctcctcctgcttcctccgctgggcctggatggctgcctcacctctcacctcccaacgtccctagcccttacgtccttccacttccaagatctttttccaggttcctgagccctactgtgtctcaggtgtgccctgaaaccccagggcttgtgtgcacatatccttagcccatctttcaagggacctctccatgatcccacctcccattcacagatacctctcttgtagctctctgacctcctccttcatggcaggcatcgccattcttgctgaaccgtttgtgattgccatttgagctctggaagcctctattgccatgagagttctgtcacggtcactttactgtccccatcatcacccagcacggggctaagcatatactagatagtcaataaataa

SEQ ID NO: 45 - protein, 258 aa, Homo sapiens
MASAAAAEAEKGSPVVVGLLVVGNIIILLSGLSLFAETIWVTADQYRVYPLMGVSGKDDVFAGAWIAIFCGFSFFMVASFGVGAALCRRRSMVLTYLVLMLIVYIFECASCITSYTHRDYMVSNPSLITKQMLTFYSADTDQGQELTRLWDRVMIEQECCGTSGPMDWVNFTSAFRAATPEVVFPWPPLCCRRTGNFIPLNEEGCRLGHMDYLFTKGCFEHIGHAIDSYTWGISWFGFAILMWTLPVMLIAMYFYTML

SEQ ID NO: 46 - DNA, 932 bp, Homo sapiens
gaaagcctgccagcacctattccacctcccagcccagcatggcacccctgctgcccatccggaccttgcccttgatcctgattctgctggctctgctgtccccaggggctgcagacttcaacatctcaagcctctctggtctgctgtccccggcgctaacggagagcctgctggttgccttgcccccctgtcacctcacaggaggcaatgccacactgatggtccggagagccaatgacagcaaagtggtgacgtccagctttgtggtgcctccgtgccgtgggcgcagggaactggtgagtgtggtggacagtggtgctggcttcacagtcactcggctcagtgcataccaggtgacaaacctcgtgccaggaaccaaattctacatttcctacctagtgaagaaggggacagccactgagtccagcagagagatcccaatgtccacactccctcgaaggaacatggaatccattgggctgggtatggcccgcacagggggcatggtggtcatcacggtgctgctctctgtcgccatgttcctgctggtgctgggcttcatcattgccctggcactgggctcccgcaagtaaggaggtctgcccggagcagcagcttctccaggaagcccagggcaccatccagctccccagcccacctgctcccaggccccaggcctgtggctcccttggtgccctcgcctcctcctcctgccctcctctcccctagagccctctcctccctctgtccctctccttgcccccagtgcctcaccttccaacactccattattcctctcaccccactcctgtcagagttgactttcctcccattttaccactttaaacacccccataacaattcccccatccttcagtgaactaagtccctataataaaggctgaggctgcatctgccaaaaaaaaaaaaaa

SEQ ID NO: 47 - protein, 184 aa, Homo sapiens
MAPLLPIRTLPLILILLALLSPGAADFNISSLSGLLSPALTESLLVALPPCHLTGGNATLMVRRANDSKVVTSSFVVPPCRGRRELVSVVDSGAGFTVTRLSAYQVTNLVPGTKFYISYLVKKGTATESSREIPMSTLPRRNMESIGLGMARTGGMVVITVLLSVAMFLLVLGFIIALALGSRK

SEQ ID NO: 48 - DNA, 3078 bp, Homo sapiens
attgctgatggatcagtgagcctgtgttcatgccagtgagctgctgtggctcagatactgatactttctttccaaacagcataagaagtgattgagccacaagtatactgaaggaagggctccctcgagttctggtgtgaagagataaatcaccagtcacagactatgcacccgactgctgctgttcagtccagggaaaatgaaagttggagtgctgtggctcatttctttcttcaccttcactgacggccacggtggcttcctggggaaaaatgatggcatcaaaacaaaaaaagaactcattgtgaataagaaaaaacatctaggcccagtcgaagaatatcagctgctgcttcaggtgacctatagagattccaaggagaaaagagatttgagaaattttctgaagctcttgaagcctccattattatggtcacatgggctaattagaattatcagagcaaaggctaccacagactgcaacagcctgaatggagtcctgcagtgtacctgtgaagacagctacacctggtttcctccctcatgccttgatccccagaactgctaccttcacacggctggagcactcccaagctgtgaatgtcatctcaacaacctcagccagagtgtcaatttctgtgagagaacaaagatttggggcactttcaaaattaatgaaaggtttacaaatgaccttttgaattcatcttctgctatatactccaaatatgcaaatggaattgaaattcaacttaaaaaagcatatgaaagaattcaaggttttgagtcggttcaggtcacccaatttcgaaatggaagcatcgttgctgggtatgaagttgttggctccagcagtgcatctgaactgctgtcagccattgaacatgttgccgagaaggctaagacagcccttcacaagctgtttccattagaagacggctctttcagagtgttcggaaaagcccagtgtaatgacattgtctttggatttgggtccaaggatgatgaatataccctgccctgcagcagtggctacaggggaaacatcacagccaagtgtgagtcctctgggtggcaggtcatcagggagacttgtgtgctctctctgcttgaagaactgaacaagaatttcagtatgattgtaggcaatgccactgaggcagctgtgtcatccttcgtgcaaaatctttctgtcatcattcggcaaaacccatcaaccacagtggggaatctggcttcggtggtgtcgattctgagcaatatttcatctctgtcactggccagccatttcagggtgtccaattcaacaatggaggatgtcatcagtatagctgacaatatccttaattcagcctcagtaaccaactggacagtcttactgcgggaagaaaagtatgccagctcacggttactagagacattagaaaacatcagcactctggtgcctccgacagctcttcctctgaatttttctcggaaattcattgactggaaagggattccagtgaacaaaagccaactcaaaaggggttacagctatcagattaaaatgtgtccccaaaatacatctattcccatcagaggccgtgtgttaattgggtcagaccaattccagagatcccttccagaaactattatcagcatggcctcgttgactctggggaacattctacccgtttccaaaaatggaaatgctcaggtcaatggacctgtgatatccacggttattcaaaactattccataaatgaagttttcctatttttttccaagatagagtcaaacctgagccagcctcattgtgtgttttgggatttcagtcatttgcagtggaacgatgcaggctgccacctagtgaatgaaactcaagacatcgtgacgtgccaatgtactcacttgacctccttctccatattgatgtcaccttttgtcccctctacaatcttccccgttgtaaaatggatcacctatgtgggactgggtatctccattggaagtctcattttatgcctgatcatcgaggctttgttttggaagcagattaaaaaaagccaaacctctcacacacgtcgtatttgcatggtgaacatagccctgtccctcttgattgctgatgtctggtttattgttggtgccacagtggacaccacggtgaacccttctggagtctgcacagctgctgtgttctttacacacttcttctacctctctttgttcttctggatgctcatgcttggcatcctgctggcttaccggatcatcctcgtgttccatcacatggcccagcatttgatgatggctgttggattttgcctgggttatgggtgccctctcattatatctgtcattaccattgctgtcacgcaacctagcaatacctacaaaaggaaagatgtgtgttggcttaactggtccaatggaagcaaaccactcctggcttttgttgtccctgcactggctattgtggctgtgaacttcgttgtggtgctgctagttctcacaaagctctggaggccgactgttggggaaagactgagtcgggatgacaaggccaccatcatccgcgtggggaagagcctcctcattctgacccctctgctagggctcacctggggctttggaataggaacaatagtggacagccagaatctggcttggcatgttatttttgctttactcaatgcattccagggattttttatcttatgctttggaatactcttggacagtaagctgcgacaacttctgttcaacaagttgtctgccttaagttcttggaagcaaacagaaaagcaaaactcatcagatttatctgccaaacccaaattctcaaagcctttcaacccactgcaaaacaaaggccattatgcattttctcatactggagattcctccgacaacatcatgctaactcagtttgtctcaaatgaataaggcaaggaatcataaaatcaagaaaaaatttccagaacaacttgacatttagagacaaatgtcaatgaagaaattatgctcagtattcgatcgggttttctgatttaggggtctgggaataaaacaagaatgtctcagtggcttca

SEQ ID NO: 49 - protein, 910 aa, Homo sapiens
MKVGVLWLISFFTFTDGHGGFLGKNDGIKTKKELIVNKKKHLGPVEEYQLLLQVTYRDSKEKRDLRNFLKLLKPPLLWSHGLIRIIRAKATTDCNSLNGVLQCTCEDSYTWFPPSCLDPQNCYLHTAGALPSCECHLNNLSQSVNFCERTKIWGTFKINERFTNDLLNSSSAIYSKYANGIEIQLKKAYERIQGFESVQVTQFRNGSIVAGYEVVGSSSASELLSAIEHVAEKAKTALHKLFPLEDGSFRVFGKAQCNDIVFGFGSKDDEYTLPCSSGYRGNITAKCESSGWQVIRETCVLSLLEELNKNFSMIVGNATEAAVSSFVQNLSVIIRQNPSTTVGNLASVVSILSNISSLSLASHFRVSNSTMEDVISIADNILNSASVTNWTVLLREEKYASSRLLETLENISTLVPPTALPLNFSRKFIDWKGIPVNKSQLKRGYSYQIKMCPQNTSIPIRGRVLIGSDQFQRSLPETIISMASLTLGNILPVSKNGNAQVNGPVISTVIQNYSINEVFLFFSKIESNLSQPHCVFWDFSHLQWNDAGCHLVNETQDIVTCQCTHLTSFSILMSPFVPSTIFPVVKWITYVGLGISIGSLILCLIIEALFWKQIKKSQTSHTRRICMVNIALSLLIADVWFIVGATVDTTVNPSGVCTAAVFFTHFFYLSLFFWMLMLGILLAYRIILVFHHMAQHLMMAVGFCLGYGCPLIISVITIAVTQPSNTYKRKDVCWLNWSNGSKPLLAFVVPALAIVAVNFVVVLLVLTKLWRPTVGERLSRDDKATIIRVGKSLLILTPLLGLTWGFGIGTIVDSQNLAWHVIFALLNAFQGFFILCFGILLDSKLRQLLFNKLSALSSWKQTEKQNSSDLSAKPKFSKPFNPLQNKGHYAFSHTGDSSDNIMLTQFVSNE

SEQ ID NO: 50 - DNA, 3418 bp, Homo sapiens
caggaatttgtggcggagagggcaaataactgcggctctcccggcgccccgatgctcgcaccatgtcgaggcgcaagcaggcgaaaccccagcacatcaactcggaggaggaccagggcgagcagcagccgcagcagcagaccccggagtttgcagatgcggccccagcggcgcccgcggcgggggagctgggtgctccagtgaaccacccagggaatgacgaggtggcgagtgaggatgaagccacagtaaagcggcttcgtcgggaggagacgcacgtctgtgagaaatgctgtgcggagttcttcagcatctctgagttcctggaacataagaaaaattgcactaaaaatccacctgtcctcatcatgaatgacagcgaggggcctgtgccttcagaagacttctccggagctgtactgagccaccagcccaccagtcccggcagtaaggactgtcacagggagaatggcggcagctcagaggacatgaaggagaagccggatgcggagtctgtggtgtacctaaagacagagacagccctgccacccaccccccaggacataagctatttagccaaaggcaaagtggccaacactaatgtgaccttgcaggcactacggggcaccaaggtggcggtgaatcagcggagcgcggatgcactccctgcccccgtgcctggtgccaacagcatcccgtgggtcctcgagcagatcttgtgtctgcagcagcagcagctacagcagatccagctcaccgagcagatccgcatccaggtgaacatgtgggcctcccacgccctccactcaagcggggcaggggccgacactctgaagaccttgggcagccacatgtctcagcaggtttctgcagctgtggctttgctcagccagaaagctggaagccaaggtctgtctctggatgccttgaaacaagccaagctacctcacgccaacatcccttctgccaccagctccctgtccccagggctggcacccttcactctgaagccggatgggacccgggtgctcccgaacgtcatgtcccgcctcccgagcgctttgcttcctcaggccccgggctcggtgctcttccagagccctttctccactgtggcgctagacacatccaagaaagggaaggggaagccaccgaacatctccgcggtggatgtcaaacccaaagacgaggcggccctctacaagcacaagtgtaagtactgtagcaaggtttttgggactgatagctccttgcagatccacctccgctcccacactggagagagacccttcgtgtgctctgtctgtggtcatcgcttcaccaccaagggcaacctcaaggtgcactttcaccgacatccccaggtgaaggcaaacccccagctgtttgccgagttccaggacaaagtggcggccggcaatggcatcccctatgcactctctgtacctgaccccatagatgaaccgagtctttctttagacagcaaacctgtccttgtaaccacctctgtagggctacctcagaatctttcttcggggactaatcccaaggacctcacgggtggctccttgcccggtgacctgcagcctgggccttctccagaaagtgagggtggacccacactccctggggtgggaccaaactataattccccaagggctggtggcttccaagggagtgggacccctgagccagggtcagagaccctgaaattgcagcagttggtggagaacattgacaaggccaccactgatcccaacgaatgtctcatttgccaccgagtcttaagctgtcagagctccctcaagatgcattatcgcacccacaccggggagagaccgttccagtgtaagatctgtggccgagccttttctaccaaaggtaacctgaagacacaccttggggttcaccgaaccaacacatccattaagacgcagcattcgtgccccatctgccagaagaagttcactaatgccgtgatgctgcagcaacatattcggatgcacatgggcggtcagattcccaacacgcccctgccagagaatccctgtgactttacgggttctgagccaatgaccgtgggtgagaacggcagcaccggcgctatctgccatgatgatgtcatcgaaagcatcgatgtagaggaagtcagctcccaggaggctcccagcagctcctccaaggtccccacgcctcttcccagcatccactcggcatcacccacgctagggtttgccatgatggcttccttagatgccccagggaaagtgggtcctgccccttttaacctgcagcgccagggcagcagagaaaacggttccgtggagagcgatggcttgaccaacgactcatcctcgctgatgggagaccaggagtatcagagccgaagcccagatatcctggaaaccacatccttccaggcactctccccggccaatagtcaagccgaaagcatcaagtcaaagtctcccgatgctgggagcaaagcagagagctccgagaacagccgcactgagatggaaggtcggagcagtctcccttccacgtttatccgagccccgccgacctatgtcaaggttgaagttcctggcacatttgtgggaccctcgacattgtccccagggatgacccctttgttagcagcccagccacgccgacaggccaagcaacatggctgcacacggtgtgggaagaacttctcgtctgctagcgctcttcagatccacgagcggactcacactggagagaagccttttgtgtgcaacatttgtgggcgagcttttaccaccaaaggcaacttaaaggttcactacatgacacacggggcgaacaataactcagcccgccgtggaaggaagttggccatcgagaacaccatggctctgttaggtacggacggaaaaagagtctcagaaatctttcccaaggaaatcctggccccttcagtgaatgtggaccctgttgtgtggaaccagtacaccagcatgctcaatggcggtctggccgtgaagaccaatgagatctctgtgatccagagtgggggggttcctaccctcccggtttccttgggggccacctccgttgtgaataacgccactgtctccaagatggatggctcccagtcgggtatcagtgcagatgtggaaaaaccaagtgctactgacggcgttcccaaacaccagtttcctcacttcctggaagaaaacaagattgcggtcagctaagggagaacttgcgtggaaggagcaatgcagacacagtgaaatctctagaatctgctttgttttgtaagaactcatctcctcctgttttctttttcttactgatatgcaaatgatgtttactacgttggttgtgaccacaacctcaggcaagtgctacaatcacgattgttgctatgctgctttgcaaaaagttg

SEQ ID NO: 51 - protein, 1053 aa, Homo sapiens
MSRRKQAKPQHINSEEDQGEQQPQQQTPEFADAAPAAPAAGELGAPVNHPGNDEVASEDEATVKRLRREETHVCEKCCAEFFSISEFLEHKKNCTKNPPVLIMNDSEGPVPSEDFSGAVLSHQPTSPGSKDCHRENGGSSEDMKEKPDAESVVYLKTETALPPTPQDISYLAKGKVANTNVTLQALRGTKVAVNQRSADALPAPVPGANSIPWVLEQILCLQQQQLQQIQLTEQIRIQVNMWASHALHSSGAGADTLKTLGSHMSQQVSAAVALLSQKAGSQGLSLDALKQAKLPHANIPSATSSLSPGLAPFTLKPDGTRVLPNVMSRLPSALLPQAPGSVLFQSPFSTVALDTSKKGKGKPPNISAVDVKPKDEAALYKHKCKYCSKVFGTDSSLQIHLRSHTGERPFVCSVCGHRFTTKGNLKVHFHRHPQVKANPQLFAEFQDKVAAGNGIPYALSVPDPIDEPSLSLDSKPVLVTTSVGLPQNLSSGTNPKDLTGGSLPGDLQPGPSPESEGGPTLPGVGPNYNSPRAGGFQGSGTPEPGSETLKLQQLVENIDKATTDPNECLICHRVLSCQSSLKMHYRTHTGERPFQCKICGRAFSTKGNLKTHLGVHRTNTSIKTQHSCPICQKKFTNAVMLQQHIRMHMGGQIPNTPLPENPCDFTGSEPMTVGENGSTGAICHDDVIESIDVEEVSSQEAPSSSSKVPTPLPSIHSASPTLGFAMMASLDAPGKVGPAPFNLQRQGSRENGSVESDGLTNDSSSLMGDQEYQSRSPDILETTSFQALSPANSQAESIKSKSPDAGSKAESSENSRTEMEGRSSLPSTFIRAPPTYVKVEVPGTFVGPSTLSPGMTPLLAAQPRRQAKQHGCTRCGKNFSSASALQIHERTHTGEKPFVCNICGRAFTTKGNLKVHYMTHGANNNSARRGRKLAIENTMALLGTDGKRVSEIFPKEILAPSVNVDPVVWNQYTSMLNGGLAVKTNEISVIQSGGVPTLPVSLGATSVVNNATVSKMDGSQSGISADVEKPSATDGVPKHQFPHFLEENKIAVS

SEQ ID NO: 52 - DNA, 570 bp, Homo sapiens
tctagcattaaaggaagaaaccccgtcttgcaacgaaggcctcaaagaggtccaaatatcaacttgcagacataacaagcagagtgtttctaaactgctctaagaaaagaaaggttaaactctgtgagttgaaggcacacatcacaaagtagtttctgagaatgattctgtctagtttttatttgaagatatttccttttctactgttggcatcaaatcgcttgaaatctccacttgcaaattccacaaaaagagtgtttcaaatctgctctgtgtaaagggacgttccactctgtgagttgaatacacacaacacaaggaagttactgagaattcttctgtctagcatgatatgaagaaatcccgtttccaacgaaggcctcaatgaggtctatatatccacttgcagactttacaaacagagtgtttcctaactgctctatgaaaagaaaggttaaactctgtggagttgaacgcacacatcacaaaaggagtttctgagaatcattctgtctagtttttttaggaagatatttccttttctaccgttgacttcaaagcggctgaaat

SEQ ID NO: 53 - DNA, 2158 bp, Homo sapiens
ggagagaagaaaggagggggcaagggagaagctgctggtcggactcacaatgaaaacgctccttcttttgctgctggtgctcctggagctgggagaggcccaaggatcccttcacagggtgcccctcaggaggcatccgtccctcaagaagaagctgcgggcacggagccagctctctgagttctggaaatcccataatttggacatgatccagttcaccgagtcctgctcaatggaccagagtgccaaggaacccctcatcaactacttggatatggaatacttcggcactatctccattggctccccaccacagaacttcactgtcatcttcgacactggctcctccaacctctgggtcccctctgtgtactgcactagcccagcctgcaagacgcacagcaggttccagccttcccagtccagcacatacagccagccaggtcaatctttctccattcagtatggaaccgggagcttgtccgggatcattggagccgaccaagtctctgtggaaggactaaccgtggttggccagcagtttggagaaagtgtcacagagccaggccagacctttgtggatgcagagtttgatggaattctgggcctgggatacccctccttggctgtgggaggagtgactccagtatttgacaacatgatggctcagaacctggtggacttgccgatgttttctgtctacatgagcagtaacccagaaggtggtgcggggagcgagctgatttttggaggctacgaccactcccatttctctgggagcctgaattgggtcccagtcaccaagcaagcttactggcagattgcactggataacatccaggtgggaggcactgttatgttctgctccgagggctgccaggccattgtggacacagggacttccctcatcactggcccttccgacaagattaagcagctgcaaaacgccattggggcagcccccgtggatggagaatatgctgtggagtgtgccaaccttaacgtcatgccggatgtcaccttcaccattaacggagtcccctataccctcagcccaactgcctacaccctactggacttcgtggatggaatgcagttctgcagcagtggctttcaaggacttgacatccaccctccagctgggcccctctggatcctgggggatgtcttcattcgacagttttactcagtctttgaccgtgggaataaccgtgtgggactggccccagcagtcccctaaggaggggccttgtgtctgtgcctgcctgtctgacagaccttgaatatgttaggctggggcattctttacacctacaaaaagttattttccagagaatgtagctgtttccagggttgcaacttgaattaagaccaaacagaacatgagaatacacacacacacacacatatacacacacacacacttcacacatacacaccactcccaccaccgtcatgatggaggaattacgttatacattcatattttgtattgatttttgattatgaaaatcaaaaattttcacatttgattatgaaaatctccaaacatatgcacaagcagagatcatggtataataaatccctttgcaactccactcagccctgacaacccatccacacacggccaggcctgtttatctacactgctgcccactcctctctccagctccacatgctgtacctggatcattctgaagcaaattccgagcattacatcattttgtccataaatatttctaacatccttaaatatacaatcggaattcaagcatctcccattgtcccacaaatgtttggctgtttttgtagttggattgtttgtattaggattcaagcaaggcccatatattgcatttatttgaaatgtctgtaagtctctttccatctacagagtttagcacatttgaacgttgctggttgaaatcccgaggtgtcatttgacatggttctctgaacttatctttcctataaaatggtagttagatctggaggtctgattttgtggcaaaaatacttcctaggtggtgctgggtacttcttgttgcatcctgtcaggaggcagataatgctggtgcctctctattggtaatgttaagactgctgggtgggtttggagttcttggctttaatcattcattacaaagttcagcatttt

SEQ ID NO: 54 - protein, 396 aa, Homo sapiens
MKTLLLLLLVLLELGEAQGSLHRVPLRRHPSLKKKLRARSQLSEFWKSHNLDMIQFTESCSMDQSAKEPLINYLDMEYFGTISIGSPPQNFTVIFDTGSSNLWVPSVYCTSPACKTHSRFQPSQSSTYSQPGQSFSIQYGTGSLSGIIGADQVSVEGLTVVGQQFGESVTEPGQTFVDAEFDGILGLGYPSLAVGGVTPVFDNMMAQNLVDLPMFSVYMSSNPEGGAGSELIFGGYDHSHFSGSLNWVPVTKQAYWQIALDNIQVGGTVMFCSEGCQAIVDTGTSLITGPSDKIKQLQNAIGAAPVDGEYAVECANLNVMPDVTFTINGVPYTLSPTAYTLLDFVDGMQFCSSGFQGLDIHPPAGPLWILGDVFIRQFYSVFDRGNNRVGLAPAVP

SEQ ID NO: 55 - DNA, 2178 bp, Homo sapiens
tacgcgctgcgggaccggcaggggaacgccatcggggtcacagcctgcgacatcgacggggacggccgggaggagatctacttcctcaacaccaataatgccttctcgggggtggccacgtacaccgacaagttgttcaagttccgcaataaccggtgggaagacatcctgagcgatgaggtcaacgtggcccgtggtgtggccagcctctttgccggacgctctgtggcctgtgtggacagaaagggctctggacgctactctatctacattgccaattacgcctacggtaatgtgggccctgatgccctcattgaaatggaccctgaggccagtgacctctcccggggcattctggcgctcagagatgtggctgctgaggctggggtcagcaaatatacagggggccgaggcgtcagcgtgggccccatcctcagcagcagtgcctcggatatcttctgcgacaatgagaatgggcctaacttccttttccacaaccggggcgatggcacctttgtggacgctgcggccagtgctggtgtggacgacccccaccagcatgggcgaggtgtcgccctggctgacttcaaccgtgatggcaaagtggacatcgtctatggcaactggaatggcccccaccgcctctatctgcaaatgagcacccatgggaaggtccgcttccgggacatcgcctcacccaagttctccatgccctcccctgtccgcacggtcatcaccgccgactttgacaatgaccaggagctggagatcttcttcaacaacattgcctaccgcagctcctcagccaaccgcctcttccgcgtcatccgtagagagcacggagaccccctcatcgaggagctcaatcccggcgacgccttggagcctgagggccggggcacagggggtgtggtgaccgacttcgacggagacgggatgctggacctcatcttgtcccatggagagtccatggctcagccgctgtccgtcttccggggcaatcagggcttcaacaacaactggctgcgagtggtgccacgcacccgggttggggcctttgccaggggagctaaggtcgtgctctacaccaagaagagtggggcccacctgaggatcatcgacgggggctcaggctacctgtgtgagatggagcccgtggcacactttggcctggggaaggatgaagccagcagtgtggaggtgacgtggccagatggcaagatggtgagccggaacgtggccagcggggagatgaactcagtgctggagatcctctacccccgggatgaggacacacttcaggacccagccccactggagacaccaatgaatgcatccagttcccattcgtgtgccctcgagacaagcccgtatgtgtcaacacctatggaagctacaggtgccggaccaacaagaagtgcagtcggggctacgagcccaacgaggatggcacagcctgcgtggggactctcggccagtcaccgggcccccgccccaccacccccaccgctgctgctgccactgccgctgctgctgccgctgctggagctgccactgctgcaccggtcctcgtagatggagatctcaatctggggtcggtggttaaggagagctgcgagcccagctgctgagcaggggtgggacatgaaccagcggatggagtccagcaggggagtgggaaagtgggcttgtgctgctgcctagacagtagggatgtaaaggcctgggagctagaccctccccaagcccatccatgcacattacttagctaacaattagggagactcgtaaggccaggccctgtgctgggcacatagctgtgatcacagcagacagggtcgctgccctgatggcgcttacattccagtgggtctaatgaccatatcttaggacacagatgtgcccagggaggtggtgtcactgcacaggaagtatgaggactttagtgtcctgagttcaaatcctgattcaggaactcacaaagctatgtgaccttacaccagtcacttaacttgttagccatccattatcgcatctgcaaaatggggattaagaatagaatcttggggttagtgtggagattagattaaatgtatgtaagacacttggcacaaaacctggcacatagtaaaggctcaataaaaacaagtgcctctcactgggctttgtcaacacgtg

SEQ ID NO: 56 - protein, 418 aa, Homo sapiens
MDPEASDLSRGILALRDVAAEAGVSKYTGGRGVSVGPILSSSASDIFCDNENGPNFLFHNRGDGTFVDAAASAGVDDPHQHGRGVALADFNRDGKVDIVYGNWNGPHRLYLQMSTHGKVRFRDIASPKFSMPSPVRTVITADFDNDQELEIFFNNIAYRSSSANRLFRVIRREHGDPLIEELNPGDALEPEGRGTGGVVTDFDGDGMLDLILSHGESMAQPLSVFRGNQGFNNNWLRVVPRTRVGAFARGAKVVLYTKKSGAHLRIIDGGSGYLCEMEPVAHFGLGKDEASSVEVTWPDGKMVSRNVASGEMNSVLEILYPRDEDTLQDPAPLETPMNASSSHSCALETSPYVSTPMEATGAGPTRSAVGATSPTRMAQPAWGLSASHRAPAPPPPPLLLPLPLLLPLLELPLLHRSS

SEQ ID NO: 57 - DNA, 2507 bp, Homo sapiens
atgtccaggatgttaccgttcctgctgctgctctggtttctgcccatcactgaggggtcccagcgggctgaacccatgttcactgcagtcaccaactcagttctgcctcctgactatgacagtaatcccacccagctcaactatggtgtggcagttactgatgtggaccatgatggggactttgagatcgtcgtggcggggtacaatggacccaacctggttctgaagtatgaccgggcccagaagcggctggtgaacatcgcggtcgatgagcgcagctcaccctactacgcgctgcgggaccggcaggggaacgccatcggggtcacagcctgcgacatcgacggggacggccgggaggagatctacttcctcaacaccaataatgccttctcgggggtggccacgtacaccgacaagttgttcaagttccgcaataaccggtgggaagacatcctgagcgatgaggtcaacgtggcccgtggtgtggccagcctctttgccggacgctctgtggcctgtgtggacagaaagggctctggacgctactctatctacattgccaattacgcctacggtaatgtgggccctgatgccctcattgaaatggaccctgaggccagtgacctctcccggggcattctggcgctcagagatgtggctgctgaggctggggtcagcaaatatacagggggccgaggcgtcagcgtgggccccatcctcagcagcagtgcctcggatatcttctgcgacaatgagaatgggcctaacttccttttccacaaccggggcgatggcacctttgtggacgctgcggccagtgctggtgtggacgacccccaccagcatgggcgaggtgtcgccctggctgacttcaaccgtgatggcaaagtggacatcgtctatggcaactggaatggcccccaccgcctctatctgcaaatgagcacccatgggaaggtccgcttccgggacatcgcctcacccaagttctccatgccctcccctgtccgcacggtcatcaccgccgactttgacaatgaccaggagctggagatcttcttcaacaacattgcctaccgcagctcctcagccaaccgcctcttccgcgtcatccgtagagagcacggagaccccctcatcgaggagctcaatcccggcgacgccttggagcctgagggccggggcacagggggtgtggtgaccgacttcgacggagacgggatgctggacctcatcttgtcccatggagagtccatggctcagccgctgtccgtcttccggggcaatcagggcttcaacaacaactggctgcgagtggtgccacgcacccggtttggggcctttgccaggggagctaaggtcgtgctctacaccaagaagagtggggcccacctgaggatcatcgacgggggctcaggctacctgtgtgagatggagcccgtggcacactttggcctggggaaggatgaagccagcagtgtggaggtgacgtggccagatggcaagatggtgagccggaacgtggccagcggggagatgaactcagtgctggagatcctctacccccgggatgaggacacacttcaggacccagccccactggagtgtggccaaggattctcccagcaggaaaatggccattgcatggacaccaatgaatgcatccagttcccattcgtgtgccctcgagacaagcccgtatgtgtcaacacctatggaagctacaggtgccggaccaacaagaagtgcagtcggggctacgagcccaacgaggatggcacagcctgcgtggggactctcggccagtcaccgggcccccgccccaccacccccaccgctgctgctgccactgccgctgctgctgccgctgctggagctgccactgctgcaccggtcctcgtagatggagatctcaatctggggtcggtggttaaggagagctgcgagcccagctgctgagcaggggtgggacatgaaccagcggatggagtccagcaggggagtgggaaagtgggcttgtgctgctgcctagacagtagggatgtaaaggcctgggagctagaccctccccaagcccatccatgcacattacttagctaacaattagggagactcgtaaggccaggccctgtgctgggcacatagctgtgatcacagcagacagggtcgctgccctgatggcgcttacattccagtgggtctaatgaccatatcttaggacacagatgtgcccagggaggtggtgtcactgcacaggaagtatgaggactttagtgtcctgagttcaaatcctgattcaggaactcacaaagctatgtgaccttacaccagtcacttaacttgttagccatccattatcgcatctgcaaaatggggattaagaatagaatcttggggttagtgtggagattagattaaatgtatgtaagacacttggcacaaaacctggcacatagtaaaggctcaataaaaacaagtgcctctcactgggctttgtcaacacg

SEQ ID NO: 58 - protein, 653 aa, Homo sapiens
MSRMLPFLLLLWFLPITEGSQRAEPMFTAVTNSVLPPDYDSNPTQLNYGVAVTDVDHDGDFEIVVAGYNGPNLVLKYDRAQKRLVNIAVDERSSPYYALRDRQGNAIGVTACDIDGDGREEIYFLNTNNAFSGVATYTDKLFKFRNNRWEDILSDEVNVARGVASLFAGRSVACVDRKGSGRYSIYIANYAYGNVGPDALIEMDPEASDLSRGILALRDVAAEAGVSKYTGGRGVSVGPILSSSASDIFCDNENGPNFLFHNRGDGTFVDAAASAGVDDPHQHGRGVALADFNRDGKVDIVYGNWNGPHRLYLQMSTHGKVRFRDIASPKFSMPSPVRTVITADFDNDQELEIFFNNIAYRSSSANRLFRVIRREHGDPLIEELNPGDALEPEGRGTGGVVTDFDGDGMLDLILSHGESMAQPLSVFRGNQGFNNNWLRVVPRTRFGAFARGAKVVLYTKKSGAHLRIIDGGSGYLCEMEPVAHFGLGKDEASSVEVTWPDGKMVSRNVASGEMNSVLEILYPRDEDTLQDPAPLECGQGFSQQENGHCMDTNECIQFPFVCPRDKPVCVNTYGSYRCRTNKKCSRGYEPNEDGTACVGTLGQSPGPRPTTPTAAAATAAAAAAAGAATAAPVLVDGDLNLGSVVKESCEPSC

SEQ ID NO: 59 - DNA, 4794 bp, Homo sapiens
atggcgtgtccgggaggactcccagcccgttgctctggttggatgggactgggtgggcccagcggctcctccccagcatcccctccccattcctcctccaggtacaatggacccaacctggttctgaagtatgaccgggcccagaagcggctggtgaacatcgcggtcgatgagcgcagctcaccctactacgcgctgcgggaccggcaggggaacgccatcggggtcacagcctgcgacatcgacggggacggccgggaggagatctacttcctcaacaccaataatgccttctcgggccacagcagctcagcgcaggtcccttctgggctccacagaaacaggcctgtgctgaagcctccacctacaacccctgcaggcctcctgggtctgcctccactcagcggaagggacttttcctcctccctgggtcaggcttctccggacagcaggcagggagagagggtgccggttccctgctgtcggggtggactgagacctacccatgaaccagaaccatttcttctgagacccaaatcaggggtggccacgtacaccgacaagttgttcaagttccgcaataaccggtgggaagacatcctgagcgatgaggtcaacgtggcccgtggtgtggccagcctctttgccggacgctctgtggcctgtgtggacagaaagggctctggacgctactctatctacattgccaattacgcctacggtaatgtgggccctgatgccctcattgaaatggaccctgaggccagtgacctctcccggggcattctggcgctcagagatgtggctgctgaggctggggtcagcaaatatacagaaggcttctcccacactgcctctccaagcattggtgagatatctggcagaaccgaggagcgggaaggaggagacccagaggaggcagatgaggagcacagtggggatggaagcaccagccaactgtgccggctgggctggaaggacgggcagttcaaggaagaagcagcagctttggtggaggaacagagggaggctggggcagctggcgtgcccagaggacgtgttcgaacagctctgcagacttccaaaagccatttggctgacaagaacctatttggcccaccatgttactattctgtctgcgcgccttctccagcccaccctttccctgcccgccaagccccccaacactaccctgtagccccccttgtcactcagctaatgacacatggacgtctggctggaaaactagcccggagtgtcccccacccccgagccccaggaatggaccccaaatgtaagggccgccatgctgagcccggcctgatggctgaggctttgggcgcgtggccagcgctcagcaccactgtggtgccagggggcctgagaagctgggaggaaagcaggcagaaggggcaggccatgtccagatgtgcactcagggagctgggaggtccctggagccaagccacacagcacctgcctgctagagagctgtatgacctgggagaacctcccattttacaaagaacagacggagatccagggaggagaagggactcgcccaaggtcacacaggagtgccatctagtggccaccatgccagctctcgggggactcgagggccccgggagggtggccaagcgagagattgggagagagactggggcagtaggaagaccactctcccatcccctggtccccaacttccccagctgcttgaggcctcttgaagccgggacagtgccgggagctgccctgcctgggaatcctgggaactgggttctggacatggccaaggccctggcgtggaaccagatggaaaaagaggaggggaagattcatggagaccatgagcccagatttaggctcaggaaagcacgggaagcagaattccccccaggctcctctgaggagcctctgctgcagttcccctcaggcctcagaggcagccctgtcctccaggtgggcctggggcttgcttctgccactcactgtgggtcgatgtcttttctagggggccgaggcgtcagcgtgggccccatcctcagcagcagtgcctcggatatcttctgcgacaatgagaatgggcctaacttccttttccacaaccggggcgatggcacctttgtggacgctgcggccagtgctgaacgtcgtttagccttcatcgttcacctcaaatatcacctctgcagagattttcctcactccctgtgccacctagcagaaactggtccttcctcctcctgctgcccgtggcatgcacgtcttcttcaggctccacattgccatcatggtttgtctatgagctttacaaggaccgggtcacggttctattcattcttgacgcaaggcttggcctccagtgcccaccggaggacactcagcctccagggttctcagggggccccaccctgccttctggcaagagctccctgtgtcctggggtctctgatccccactgcctattacattgtcctgtggtctgccatcccagagagcctgatgacccacagctatttgtcctctgaaagagtcaacgtgggtgtggacgacccccaccagcatgggcgaggtgtcgccctggctgacttcaaccgtgatggcaaagtggacatcgtctatggcaactggaatggcccccaccgcctctatctgcaaatgagcacccatgggaaggtccgcttccgggacatcgcctcacccaagttctccatgccctcccctgtccgcacggtcatcaccgccgactttgacaatgaccaggagctggagatcttcttcaacaacattgcctaccgcagctcctcagccaaccgcctcttccgatgctccatcctggctcgtggctcttcatccttgacagctggtgggaggaacggtcagggagaaggtttaagaatcagaaggggagggttcccagggccagggggtcaggccaaggtcaacacaggtcccctgatgaagaaacagaaaggaaggaaggacgaggactgggcaagaggctgtgggaatgcagggcaaagcctggccaaggagccggcctctgctattgcagggaaagggaagggaaatgtggcccaaagtgtgcccagaacccaagcgccacaagatacaaagccacactaccacaaaaaggggctacagggtccaatcactaccaggaaaaggggctacggggtccaatcactaccaggaaaaggggctacggggtccaatcactaccaggaaaaggggctacggggtccaatcactaccaggaaaaggggctacggggtccaatcactaccaggaaaaggggctacgggctccaatcactaccaggaaaaggggctacagggtccaatcactaccaggaaaaggggctacgggctccaatcactaccaggaaaaggggctacagggtccaatcactaccacagaaaggggctacgggctccaatcactaccaggaaaaggggctacggggtccaatcactaccaggaaaaggggctacagggtccaatcactaccaggaaaaggggctacggggtccaatcactaccaggaaaaggggctacgggctccaatcactaccaggaaaaggggctacggggtccaatcactaccaggaaaaggggctacagggtccaatcactaccaggaaaaggggctacagggtccaatcactaccacagaaaggggctacgggctccaatcactaccaggaaaaggggctacggggtccaatcactaccaggaaaaggggctacgggctccaatcactaccaggaaaagaggctatggggtccaatcactaccaggaaaaggggctacgggctccaatcactaccaggaaaaggggctatggggtccaatcactaccacagaaaggggctacggggtccaacgtcatccgtagagagcacggagaccccctcatcgaggagctcaatcccggcgacgccttggagcctgagggccggggcacagggggtgtggtgaccgacttcgacggagacgggatgctggacctcatcttgtcccatggagagtccatggctcagccgctgtccgtcttccggggcaatcagggcttcaacaacaactggctgcgagtggtgccacgcacccggtttggggcctttgccaggggagctaaggtcgtgctctacaccaagaagagtggggcccacctgaggatcatcgacgggggctcaggctacctgtgtgagatggagcccgtggcacactttggcctggggaaggatgaagccagcagtgtggaggtgacgtggccagatggcaagatggtgagccggaacgtggccagcggggagatgaactcagtgctggagatcctctacccccgggatgaggacacacttcaggacccagccccactggagtgtggccaaggattctcccagcaggaaaatggccattgcatggacaccaatgaatgcatccagttcccattcgtgtgccctcgagacaagcccgtatgtgtcaacacctatggaagctacaggtgccggaccaacaagaagtgcagtcggggctacgagcccaacgaggatggcacagcctgcgtgggtactgagctaggctctaggcatacaatgacgtggaaaccaaggcccaaaaaggagctgcaactttcccaaggcatctgcacccccgtctggtcctttttcctgccgggttgccggctgctcctcaaaagagctcagctccaggctgctcccagcacccttctccagaaagctccaggtattccagaagcccaagtgtatgaacaagatcaggaataa

SEQ ID NO: 60 - protein, 1597 aa, Homo sapiens [sequence omitted]

SEQ ID NO: 61 - DNA, 1639 bp, Homo sapiens
agcagagcacacaagcttctaggacaagagccaggaagaaaccaccggaaggaaccatctcactgtgtgtaaacatgacttccaagctggccgtggctctcttggcagccttcctgatttctgcagctctgtgtgaaggtgcagttttgccaaggagtgctaaagaacttagatgtcagtgcataaagacatactccaaacctttccaccccaaatttatcaaagaactgagagtgattgagagtggaccacactgcgccaacacagaaattattgtaaagctttctgatggaagagagctctgtctggaccccaaggaaaactgggtgcagagggttgtggagaagtttttgaagagggctgagaattcataaaaaaattcattctctgtggtatccaagaatcagtgaagatgccagtgaaacttcaagcaaatctacttcaacacttcatgtattgtgtgggtctgttgtagggttgccagatgcaatacaagattcctggttaaatttgaatttcagtaaacaatgaatagtttttcattgtaccatgaaatatccagaacatacttatatgtaaagtattatttatttgaatctacaaaaaacaacaaataatttttaaatataaggattttcctagatattgcacgggagaatatacaaatagcaaaattgagccaagggccaagagaatatccgaactttaatttcaggaattgaatgggtttgctagaatgtgatatttgaagcatcacataaaaatgatgggacaataaattttgccataaagtcaaatttagctggaaatcctggatttttttctgttaaatctggcaaccctagtctgctagccaggatccacaagtccttgttccactgtgccttggtttctcctttatttctaagtggaaaaagtattagccaccatcttacctcacagtgatgttgtgaggacatgtggaagcactttaagttttttcatcataacataaattattttcaagtgtaacttattaacctatttattatttatgtatttatttaagcatcaaatatttgtgcaagaatttggaaaaatagaagatgaatcattgattgaatagttataaagatgttatagtaaatttattttattttagatattaaatgatgttttattagataaatttcaatcagggtttttagattaaacaaagaaacaattgggtacccagttaaattttcatttcagataaacaacaaataattttttagtataagtacattattgtttatctgaaagttttaattgaactaacaatcctagtttgatactcccagtcttgtcattgccagctgtgttggtagtgctgtgttgaattacggaataatgagttagaactattaaaacagccaaaactccacagtcaatattagtaatttcttgctggttgaaacttgtttattatgtacaaatagattcttataatattatttaaatgactgcatttttaaatacaaggctttatatttttaactttaagatgtttttatgtgctctccaaattttttttactgtttctgattgtatggaaatataaaagtaaatatgaaacatttaaaatataatttgttgtcaaagtaaaaaaaaaaaaaaa

SEQ ID NO: 62 - protein, 99 aa, Homo sapiens
MTSKLAVALLAAFLISAALCEGAVLPRSAKELRCQCIKTYSKPFHPKFIKELRVIESGPHCANTEIIVKLSDGRELCLDPKENWVQRVVEKFLKRAENS

SEQ ID NO: 63 - DNA, 4209 bp, Homo sapiens
gttacccagcattgtgagtgacagagcctggatctgaacgctgatcccataatgcatcctcaagtggtcatcttaagcctcatcctacatctggcagattctgtagctggttctgtaaaggttggtggagaggcaggtccatctgtcacactaccctgccactacagtggagctgtcacatccatgtgctggaatagaggctcatgttctctattcacatgccaaaatggcattgtctggaccaatggaacccacgtcacctatcggaaggacacacgctataagctattgggggacctttcaagaagggatgtctctttgaccatagaaaatacagctgtgtctgacagtggcgtatattgttgccgtgttgagcaccgtgggtggttcaatgacatgaaaatcaccgtatcattggagattgtgccacccaaggtcacgactactccaattgtcacaactgttccaaccgtcacgactgttcgaacgagcaccactgttccaacgacaacgactgttccaatgacgactgttccaacgacaactgttccaacaacaatgagcattccaacgacaacgactgttctgacgacaatgactgtttcaacgacaacgagcgttccaacgacaacgagcattccaacaacaacaagtgttccagtgacaacaactgtctctacctttgttcctccaatgcctttgcccaggcagaaccatgaaccagtagccacttcaccatcttcacctcagccagcagaaacccaccctacgacactgcagggagcaataaggagagaacccaccagctcaccattgtactcttacacaacagatgggaatgacaccgtgacagagtcttcagatggcctttggaataacaatcaaactcaactgttcctagaacatagtctactgacggccaataccactaaaggaatctatgctggagtctgtatttctgtcttggtgcttcttgctcttttgggtgtcatcattgccaaaaagtatttcttcaaaaaggaggttcaacaactaagtgtttcatttagcagccttcaaattaaagctttgcaaaatgcagttgaaaaggaagtccaagcagaagacaatatctacattgagaatagtctttatgccacggactaagacccagtggtgctctttgagagtttacgcccatgagtgcagaagactgaacagacatcagcacatcagacgtcttttagaccccaagacaatttttctgtttcagtttcatctggcattccaacatgtcagtgatactgggtagagtaactctctcactccaaactgtgtatagtcaacctcatcattaatgtagtcctaattttttatgctaaaactggctcaatccttctgatcattgcagttttctctcaaatatgaacactttataattgtatgttctttttagaccccataaatcctgtatacatcaaagagaatagtccctggaaacatagcaaatgaacttctatcttggccatcacagctgtccagaagaggggaatctgtcttaaaaaccagcaaatccaacgtgagacttcatttggaagcattgtatgattatctcttgtttctatgttatacttccaaatgttgcatttcctatgttttccaaaggtttcaaatcgtgggtttttatttcctccgtggggaaacaaagtgagtctaactcacaggtttagctgttttctcataactctggaaatgtgatgcattaagtactggatctctgaattggggtagctgttttaccagttaaagagcctacaatagtatggaacacatagacaccaggggaagaaaatcatttgccaggtgatttaacatatttatgcaatttttttttttttttttgagatggagctttgctcttgttgcccaggctggagtgcgatggtgaaatctcggctcactgtaacctccaccttccgggttcaagcaattctcccgcctcagcctcacgagtagctgggattacaggtgtccgccactatgctcagctaattttttgtatttttttagtagagacagggtttcatcatgttggccagaatgatctcgaactcctgacctcagaggatccagcctccttggccttccaaagtgctgggattacaggcatgagccaccgtgcctggtccatttatgcaatttttattacacgtgtgtcatggtgctaagcatttaaacaaccatcaggctttctgaacaaatttttagaaccaagaagatcagcaataaaagaaaaaaaaaaggcgggagtagggaaaagtctgccttttctgccttataagttacattgcagatataagtgtttgaaactcactagttttgacccaaattctaaatcgcctccaaaccactttcatgtttaaaattgtttaggaggctagcgccgtggctcatgcctgtaatcccagcactttgtgaagccaaggtgggcaggtagcttgagcccagaagtttgagaccagcctgggcaacatggcaataccccatctctattaagaaaaaaatttaaggaaaaaaaaaaaagataaaattgttttggaaaggcaaagtgtctttctcatatctaatcaattcctgtattttttttttttttttttttacaattcaattaggcttattgtaaggatatctttagtcagtataaaaatatataaaaaacaattatactaaaccagtataattgtttagaagtatatatttgccggccgggcatggtggctcatgcctgtaatcccagggctttggaaggctgaggtgagtggatcactagaggtcgggagtttgagaccagcctgaccaacatggagaaacactgttctctactaagtatagatttgcaagggctagatttgtcagaaaagaaacatttctacatgaacagttaaggctgggtattaatttcaatttcagtttgagtaaactctgaaataattcatggttgaggttcagagctacccataccatagttgtctggggcaacaggatgcttgctttcagaggaaactttttgtttttgtttttgtttttttgagatggagttttgctcttgtcacccaggctgaaatgcaatggcacaatcttggctcactgcaacctccacctcccaggttcaagtgattctcctgcctcagcctcctgagtagctgggattacagatgcccgccacaacgcccagcttatttttagtagagacagggtttcaccatattggccaggctggcctccaactcctgacctcaggtgagccacccgctttggcctccccaaagtgttgggattacaggcataagccaccgcgcccagccagaggcaacattttttaacgcagttatcattctaggaaatttataggtcctttgaaggaaaattctgtgggcaaataagattgtgatacatggtatttcagttttcccaaatgtggccagcccgatctggtcaaaaattttattttttaaaagctatagtgtctttttttcttaaatttgaggcaacatgcacaaaattggagatttgaaattaaagccaagatttgtagtttctctggaaagacctggcaagattggactggattgctatgtgaccagggtcccactagatggggctgcatcctctaatccccaaatccttatgttccctgcatgctcacctttgttacctgcctgacacctgtggggcttttaactttatggcaactgccctattctctggatccttcctgaggatttatgatgcgtaatactccaggaatctggttagctttgcttaacacatttccaaaacttgtttgaatgcatgagtacagtcactagtagcattctgtgcagtacaatgtatgggggcttaggagtttagggtagtatacaggattagggataggacttgagtctaatcctaactcttagcagttacactggatgacattagagcaaatggttctttacgtctacattttcttcatctgtagatgtaataatttccatatcaactatgatgtacagtgctaattccaatgaaatgttacatgtgagaagtctttgaaatgtaaaaaacactacagatactgaagcagtttggagaattaaaaaacactacgaaaacacagcttggtaaataattttttttttcttttgagacagagtctggctctgtcatccaggctagagtgtagtg

SEQ ID NO: 64 - protein, 359 aa, Homo sapiens
MHPQVVILSLILHLADSVAGSVKVGGEAGPSVTLPCHYSGAVTSMCWNRGSCSLFTCQNGIVWTNGTHVTYRKDTRYKLLGDLSRRDVSLTIENTAVSDSGVYCCRVEHRGWFNDMKITVSLEIVPPKVTTTPIVTTVPTVTTVRTSTTVPTTTTVPTTTVPTTMSIPTTTTVPTTMTVSTTTSVPTTTSIPTTTSVPVTTTVSTFVPPMPLPRQNHEPVATSPSSPQPAETHPTTLQGAIRREPTSSPLYSYTTDGNDTVTESSDGLWNNNQTQLFLEHSLLTANTTKGIYAGVCISVLVLLALLGVIIAKKYFFKKEVQQLSVSFSSLQIKALQNAVEKEVQAEDNIYIENSLYATD

SEQ ID NO: 65 - DNA, 6855 bp, Homo sapiens
agaagaaagctggtaggggctgggagagggtaccacaggggagtatgatctacttgggggccagagaaggttccctgaggaaatagtacctgaacttagacttgaaggataacagatgttaactgggaggagagaatgttccaggcagaggaaaaggcatatgcaaaagtccagcgccttgaaggagcacagctggggtgcctggagtgagatggagctggaaagatccaggtggagcttgacctgaagtaccagcccccagagggcgctactggagcctggtcagaggaggactttggggcacccatccaggacagcttcgagttaatcatccccaatgtgggcttccaggaactggagcctggggaggcccagctggagcggcgggcagtggctctaggccgcaggctagctcgaagtctaggccagcaggacgatgaagagaatgagctggagcttgagctggagcaggacctggatgatgagcctgacgtggaactttctggtgttatgttcagccccctcaagagccgcgccagggccctggcccatggggatcccttccaggtgtccagagctcaagacttccaggtgggagtcactgtgctggaagcccagaaactggtgggagtcaacattaacccctatgtggccgtgcaagtgggggggcagcgccgtgtgaccgccacacagcgtgggaccagttgccccttctacaatgagtacttcttgttcgaatttcatgacacgcggcttcgtctccaagacttgctgctggagatcacggtgagtggggtaggggtgaccagtgtccttcagagaaggggggatgagaaagctgcaggactaacaccaccttcccccaaggctttccattcgcagaccctcccctttatggccacccggataggcaccttcaggatggacctgggcatcatcttggaccagccaggtatggaatcgtccccttattgagactctgcacggacaagggccctagagattgaccctgcagtgactccgcatggacccctatacactcacttcggagagggccatctctggcggaggctgaactcttggcacttccgcccctccctgctgagccagagaagccctggccattgtccgtcactccgatagcctcacggccaccctgtgcgtcccgccggtcgccccttacccctggctcgccccttcgcccttagatggccagttctaccaaagatgggttccgctgcatgatccccgagacacccgcgccgggaccaagggtttcattaaggtcaccttgtccgtgagggcgcgcggggacctgccccctccaatgctacccccggccccagggcactgttcggacatcgagaagtgagccggggtgaggtggggaggaggacatggatccgggggtggccgtggggcgcggataaggggaggggccgagatcccagtttctccccccccgctcggtgccccctcccctaggaacctgctcctgccgcgcggggtgcccgccgagaggccatgggcgcggctccgcgtgcgcctgtaccgcgccgaggggcttcccgcgctgcgcctggggctgctgggcagcctggtccgcgccctgcacgaccagcgcgtcctggtggagccctatgtgcgggtgtctttcctggggcaggagggcgagacgtcggtgagcgccgaggcggcggcgcccgaatggaacgagcagctgagcttcgtggagctcttcccgccgctgacgcgcagcctccgcctgcagctgcgggacgacgcgcccctggtcgacgcggcactcgctacgcacgtgccggacctgaggcggatctcccatccgggccgcgcggcggggtttaaccctaccttcggcccggcctgggtgcccctctatggctcgccccccggcgcggggctccgggatagtcttcaaggtctcaacgaaggcgttggccaaggcatttggttccgcggccgccttctgctggctgtgtccatgcaggtgttggaagggagagctgaacctgagcctccccaggcccagcaggggtccacgttgtcccggctcacccgaaagaagaaaaagaaagccagaagggatcagaccccaaaggcggttccgcagcacttggacgccagccccggtgccgaggggcctgagatcccccgtgccatggaggtggaggtggaggagctgctgccgctgccagagaatgtcctggcgccctgtgaagatttcctgcttttcggtgtgctcttcgaggccaccatgatcgaccccaccgtggcctcccagcccatcagcttcgagatctccattggtgtgtggcctagccgaacccctgagtgccatttcagaccttagaaccctggaaggggtgttgactttcagtcgcgcaggccgtctggaggagcaattgggccgagggtccagggctggggagggaactgagggtgcagccgtggaggctcagcctctgctgggagccaggccagaggaggagaaagaggaggaagaactggggacccatgctcagcggcctgagcccatggacggcagtgggccatacttctgcttgcccctctgtcactgcaagccatgcatgcatgtgtggagttgctgggaggaccacacctggcgcctgcagagcagcaactgcgtgcgcaaagtggccgagaggctggaccaggggctgcaggaggttgagagactgcagcgcaagccggggcctggcgcctgtgcacagctcaagcaggcactggaagtactggtggctgggagcagacagttttgccacggtgccgagcgcaggacgatgacccggcccaatgccctggatcgatgccgagggaaactcctggtgcacagcctgaaccttttggctaagcaaggactgcgacttctacgcggcctgagacggcgcaatgtgcaaaagaaggtggcactggccaagaagctcctggcaaaactgcgctttctggctgaggaggcacccggggcagcccctggtgaggtctgtgccaagctggagctcttcctgcggctgggcctgggcaagcaagccaaggcctgcacctctgagctgcccccggatttgctgcccgagccctcagccgggctgccctccagcctacaccgggacggtcctggagcagacgctgagccctctgtgggatgaactcctggtatttgagcagttgatcgtggatgggaggagggagcacctgcaggaggagcctccattagtgatcatcaatgtatttgaccacaataagtttggcccccccgtgttcctgggcagggcactggccgccccaagggtaaagctgatggaggacccataccaacgcccagagttgcagttcttccccctgaggaagggaccctgggcagccggagagctcattgccgcctttcaactcattgaactagactacagtggccgacttgagccctcagtgcccagtgaggtggagccccaggatctggcacccctggttgagccccactctggacgcctgtcccttccacccaacgtgtgcccagtgctcagggagttccgtgttgaggtgctgttctggggtcttaggggacttggtcgtgtgcatctgctcgaggtggagcagccccaggttgtactggaggtggctgggcaaggtgtggagtctgaggtcctggccagctaccgtgagagccccaatttcactgagcttgtcaggcatctgacagtggtcttcaaagacacagctcctctcttccacccccaggacttgccggagcagccttacttgcagcctccactcagcatcttggtgattgagcgccgggcctttggccacacagtccttgtgggttcccacattgtcccccacatgctgcgattcacatttcggggtcatgaggatcctcctgaggaggaaggagagatggaggagacaggggatatgatgcccaagggacctcaaggacagaagtccctggatcccttcttggctgaagcgggtatatccagacagctcctgaagcacaactttgatgaagatgaaatggatgatcctggagattcagatggggtcaacctcatttctatggttggggagatccaagaccagggtgaggctgaagtcaaaggcactgtgtccccaaaaaaagcagttgccaccctgaagatctacaacaggtccctgaaggaagaatttaaccactttgaagactggctgaatgtgtttcctctgtaccgagggcaagggggccaggatggaggtggagaagaggaaggatctggacaccttgtgggcaagttcaagggctccttcctcatttaccctgaatcagaggcagtgttgttctctgagccccagatctcccgggggatcccacagaaccggcccatcaagctcctggtcagagtgtatgttgtaaaggctaccaacctggctcctgcagaccccaatggcaaagcagacccttacgtggtggtgagcgctggccgggagcggcaggacaccaaggaacgctacatccccaagcagctcaaccccatctttggagagatcctggagctaagcatctctctcccagctgagacggagctgacggtcgccgtatttgatcatgacctcgtgggttctgacgacctcatcggggagacccacattgatctggaaaaccgattctatagccaccacagagcaaactgtgggctggcctcccagtatgaagtgtgggtccagcagggcccacaggagccattctgagtttctggccaaacacattcaagctcacattcccttttgtgtctccagatcctatgatttcatggaaggggaccctcccacccaccgccactgccaaccaagacatagctcagtggtcaagacttgggcttgggagtcgggatcctgtaacgaatgtcacttgaccgctttctttttttatgaaacagtctcgctctgtctcccaggttggagtgcagtggcacgatctcggctgactgcaacctccacctcctgggttcaagcgattctcctgcctcagcctccccagtagctgggattacaggcgtgggcccccatgtccagctaatttttatattttcgctctgtctcccaggttggagtgcagtggcacgatctcggctgactgcaacctccacctcctgggttcaagcgattctcctgcctcagcctccccagtagctgggattacaggcgtgggcccccatgtccagctaatttttatatttttagtagagacagggtttcaccatgttgtccaggctggtcttgaacccctgacctcaagtgatccacccacctctgcctcccaaagtgctgggattacaggtgtgagccaccatgccaggccctcttaacctcttcaagtctgttttctcatctgcaaaacagaggtaataagatcagtatcttcttaatggaagcacctggactacatttttttcattcattgttatcataaatgaggactaacctgtctcccgttgggagttttgaacctagacctcatgtcttcatgacgtcatcactgccccaggcccagctgtgtccctacaccagccccagctgacgcatcttctttttctgcctgtagagatggttacaatgcctggcgtgatgcattctggccttcgcagatcctggcggggctgtgccaacgctgtggcctccctgcccctgaataccgagccggtgctgtcaaggtgggcagcaaagtcttcctgacaccaccggagaccctgcccccagggatctcttcacatgtggattgacatctttcctcaagatgtgcctgctccacccccagttgacatcaagcctcggcagccaatcagctatgagctcagagttgtcatctggaacacggaggatgtggttctggatgacgagaatccactcaccggagagatgtcgagtgacatctatgtgaagagctgggtgaaggggttggagcatgacaagcaggagacagacgttcacttcaactccctgactggggaggggaacttcaattggcgctttgtgttccgctttgactacctgcccacggagcgggaggtgagcgtctggcgcaggtctggaccctttgccctggaggaggcggagttccggcagcctgcagtgctggtcctgcaggatccctggagttgcagctaccagacatggtgcgtggggcccggggccccgagctctgctctgtgcagctggcccgcaatggggccgggccgaggtgcaatctgtttcgctgccgccgcctgaggggctggtggccggtagtgaagctgaaggaggcagaggacgtggagcgggaggcgcaggaggctcaggctggcaagaagaagcgaaagcagaggaggaggaagggccggccagaagacctggagttcacagacatgggtggcaatgtgtacatcctcacgggcaaggtggaggcagagtttgagctgctgactgtggaggaggccgagaaacggccagtggggaaggggcggaagcagccagagcctctggagaaacccagccgccccaaaacttccttcaactggtttgtgaacccgctgaagacctttgtcttcttcatctggcgccggtactggcgcaccctggtgctgctgctactggtgctgctcaccgtcttcctcctcctggtcttctacaccatccctggccagatcagccaggtcatcttccgtcccctccacaagtgactctcgctgaccttggacactcacccagggtgccaacccttcaatgcctgctcctggaagtctttcttacccatgtgagctaccccagagtctagtgcttcctctgaataaacctatcacagcc

SEQ ID NO: 66 - protein, 610 aa, Homo sapiens
MCKRRWHWPRSSWQNCAFWLRRHPGQPLVRSVPSWSSSCGWAWASKPRPAPLSCPRICCPSPQPGCPPAYTGTVLEQTLSPLWDELLVFEQLIVDGRREHLQEEPPLVIINVFDHNKFGPPVFLGRALAAPRVKLMEDPYQRPELQFFPLRKGPWAAGELIAAFQLIELDYSGRLEPSVPSEVEPQDLAPLVEPHSGRLSLPPNVCPVLREFRVEVLFWGLRGLGRVHLLEVEQPQVVLEVAGQGVESEVLASYRESPNFTELVRHLTVVFKDTAPLFHPQDLPEQPYLQPPLSILVIERRAFGHTVLVGSHIVPHMLRFTFRGHEDPPEEEGEMEETGDMMPKGPQGQKSLDPFLAEAGISRQLLKHNFDEDEMDDPGDSDGVNLISMVGEIQDQGEAEVKGTVSPKKAVATLKIYNRSLKEEFNHFEDWLNVFPLYRGQGGQDGGGEEEGSGHLVGKFKGSFLIYPESEAVLFSEPQISRGIPQNRPIKLLVRVYVVKATNLAPADPNGKADPYVVVSAGRERQDTKERYIPKQLNPIFGEILELSISLPAETELTVAVFDHDLVGSDDLIGETHIDLENRFYSHHRANCGLASQYEVWVQQGPQEPF

SEQ ID NO: 67 - DNA, 2808 bp, Homo sapiens
ggggggggggggcagcctctcgggaagagccaatcaggggcgagcgtcttctcgtcgcacgaggcccggcgcggattggcggcgcgcgtctcccacttcccctcggaggaaaggctcagctcccagcgcgcccctcccgtctccgcagcaaaaaagtttgagtcgccgctgccgggttgccagcggagtcgcgcgtcgggagctacgtagggcagagaagtcatggcttctccgtccaaaggcaatgacttgttttcgcccgacgaggagggcccagcagtggtggccggaccaggcccggggctggggggcgccgcgggggccgcggaggagcgccgcgtcaaggtctccagcctgcccttcagcgtggaggcgctcatgtccgacaagaagccgcccaaggagtcgcccgctgtgcctcccgaaggcgcctcggccggggcccacctgcggccactgctgctgtcggggcaccgcgctcgggaagcgcacagccccgggccgctggtgaagcccttcgagaccgcctcggtcaagtcgggaaattcagaagatggagcggcgtggatgcaggaacccggccgatattcgccgccgccaagacatatgagccctaccacctgcaccctgaggaaacacaagaccaatcggaagccgcgcacgccctttaccacatcccagctcctcgccctggagcgcaagttccgtcagaaacagtacctctccattgcagagcgtgcagagttctccagctctctgaacctcacagagacccaggtcaaaatctggttccagaaccgaagcgccaaggcgaaaagactgcaggaggcggaactggaaaagctgaaaatggctgcaaaacctatgctaccctccagcttcagtctccccttccccatcagctcgcccctgcaggcagcgtccatatacgcagcatcctacccgttccatagacctgtgcttcccatcccgcccgtgggactctatgccacgccagtgggatatggcatgtaccacctgtcctaaggaagaccagatcaatagactccatgatggatgcttgtttcaaagggtttcctctccctctccacaaaggcatagccagccagtactcctgcgctgctaagccctcgacgttgcaccccaccccctctaacggctagctgacagggccacaccacatagctgaaatttcgttctgtaggcggaggcaccaagccctgcttttcttggtgtaacttccagagtccccccttttttcccttgcacaaaagcttggctctgatggtttttttggcatgatgtatatatatatatacgaaaaatactacagaccctttttatcagcagacgtaaaaattcaaattattttaaaaggcaaaatttatatacatatgtgctttttttctatatctcaccttcccaaaaagacacatgtgtaagtccatttgttgtattttcttaaagagggagacaaattcggaggagcgccgcgtcaaggtctccagcctgcccttcagcgtggaggcgctcatgtccgatttgcaaaaatgtgctaaagtcaatgatttttaccgggattattgacttctgcttatacaagaagccgcccaaggagtcgcccgctgtgcctcccgaaggcgcctcggccggcctgcggaaaaacaaaagaaaacagacacaatgcagcagccagaaaatattagatatggagagattatggccactgctgctgaccggccacggcgtccgggaagcgcacagccccgggccgctggtgatcaaagtgaacccacatcatatttctgcattttacttgcattaaaagaaacctctttataagcccttcgagaccgcctcggtcaagtcgggaaattcagaagatggagcggcgtggatgctacatacgttgttcctatctcccgcccacgcccacacatatttttaaagtttttaggaacccggccgatattcgccgccgccaagacatatgagccctaccacctgcaccctgacctttttaagaatatttttgtaagaccaatacctgggatgagaagaatccgtagactgccggaaacacaagaccaatcggaagccgcgcacgccctttaccacatcccagctcctcgccctggaggtgaggtagaaaaattagaaatacttcctaattcttctcaaggctgttggtaactttggagcgcaagttccgtcagaaacagtacctctccattgcagagcgtgcagagttctctatttcagataattggagagtaaaatgttaaaacctgtgagaggattgtacagctctctgaacctcacagacccaggtcaaaaggttctgagaaatactaggtacattcatcctcacagattgcaaaggtgctttgggtgggggtttagtaattttctgcttaaaaaatgagtatcttgtaaccattacctatatctaaatattcttgaacaattagtagatccagaaagaaaaaaaaaatatgcttctctgtgtgtgtacctgttgtatgtcctaacttattagaaaaattttatatctttttacatgtggggggcagaaggtaaagcatgtttgacttgtgaaaatgggatgtcaaacagccataagttccctggtattcaccttcctgtccatctgtcccctccatcggtatacctttatccctttgaaagggtgcttgtacaatttgatatattttattgaagagttatctcttattctgaattaaattaagcatttgttttattctgaattaaattaagcatttgttttattgcagtaaagtttgtcca

SEQ ID NO: 68 - protein, 267 aa, Homo sapiens [sequence omitted]

SEQ ID NO: 69 - DNA, 3756 bp, Homo sapiens
atgagtacagaaagagactcagaaacgacatttgacgaggattctcagcctaatgacgaagtggttccctacagtgatgatgaaacagaagatgaacttgatgaccaggggtctgctgttgaaccagaacaaaaccgagtcaacagggaagcagaggagaaccgggagccattcagaaaagaatgtacatggcaagtcaaagcaaacgatcgcaagtaccacgaacaacctcactttatgaacacaaaattcttgtgtattaaggagagtaaatatgcgaataatgcaattaaaacatacaagtacaacgcatttacctttataccaatgaatctgtttgagcagtttaagagagcagccaatttatatttcctggctcttcttatcttacaggcagttcctcaaatctctaccctggcttggtacaccacactagtgcccctgcttgtggtgctgggcgtcactgcaatcaaagacctggtggacgatgtggctcgccataaaatggataaggaaatcaacaataggacgtgtgaagtcattaaggatggcaggttcaaagttgctaagtggaaagaaattcaagttggagacgtcattcgtctgaaaaaaaatgattttgttccagctgacattctcctgctgtctagctctgagcctaacagcctctgctatgtggaaacagcagaactggacggagaaaccaatttaaaatttaagatgtcacttgaaatcacagaccagtacctccaaagagaagatacattggctacatttgatggttttattgaatgtgaagaacccaataaccgactagataagtttacaggaacactattttggagaaacacaagttttcctttggatgctgataaaattttgttacgtggctgtgtaattaggaacaccgatttctgccacggcttagtcatttttgcaggtgctgacactaaaataatgaagaatagtgggaaaaccagatttaaaagaactaaaattgattacttgatgaactacatggtttacacgatctttgttgttcttattctgctttctgctggtcttgccatcggccatgcttattgggaagcacaggtgggcaattcctcttggtacctctatgatggagaagacgatacaccctcctaccgtggattcctcattttctggggctatatcattgttctcaacaccatggtacccatctctctctatgtcagcgtggaagtgattcgtcttggacagagtcacttcatcaactgggacctgcaaatgtactatgctgagaaggacacacccgcaaaagctagaaccaccacactcaatgaacagctcgggcagatccattatatcttctctgataagacggggacactcacacaaaatatcatgacctttaaaaagtgctgtatcaacgggcagatatatggggaccatcgggatgcctctcaacacaaccacaacaaaatagagcaagttgattttagctggaatacatatgctgatgggaagcttgcattttatgaccactatcttattgagcaaatccagtcagggaaagagccagaagtacgacagttcttcttcttgctcgcagtttgccacacagtcatggtggataggactgatggtcagctcaactaccaggcagcctctcccgatgaaggtgccctggtaaacgctgccaggaactttggctttgccttcctcgccaggacccagaacaccatcaccatcagtgaactgggcactgaaaggacttacaatgttcttgccattttggacttcaacagtgaccggaagcgaatgtctatcattgtaagaaccccagaaggcaatatcaagctttactgtaaaggtgctgacactgttatttatgaacggttacatcgaatgaatcctactaagcaagaaacacaggatgccctggatatctttgcaaatgaaactcttagaaccctatgcctttgctacaaggaaattgaagaaaaagaatttacagaatggaataaaaagtttatggctgccagtgtggcctccaccaaccgggacgaagctctggataaagtatatgaggagattgaaaaagacttaattctcctgggagctacagctattgaagacaagctacaggatggagttccagaaaccatttcaaaacttgcaaaagctgacattaagatctgggtgcttactggagacaaaaaggaaactgctgaaaatataggatttgcttgtgaacttctgactgaagacaccaccatctgctatggggaggatattaattctcttcttcatgcaaggatggaaaaccagaggaatagaggtggcgtctacgcaaagtttgcacctcctgtgcaggaatctttttttccacccggtggaaaccgtgccttaatcatcactggttcttggttgaatgaaattcttctcgagaaaaagaccaagagaaataagattctgaagctgaagttcccaagaacagaagaagaaagacggatgcggacccaaagtaaaaggaggctagaagctaagaaagagcagcggcagaaaaactttgtggacctggcctgcgagtgcagcgcagtcatctgctgccgcgtcacccccaagcagaaggccatggtggtggacctggtgaagaggtacaagaaagccatcacgctggccatcggagatggggccaatgacgtgaacatgatcaaaactgcccacattggcgttggaataagtggacaagaaggaatgcaagctgtcatgtcgagtgactattcctttgctcagttccgatatctgcagaggctactgctggtgcatggccgatggtcttacataaggatgtgcaagttcctacgatacttcttttacaaaaactttgcctttactttggttcatttctggtactccttcttcaatggctactctgcgcagactgcatacgaggattggttcatcaccctctacaacgtgctgtacaccagcctgcccgtgctcctcatggggctgctcgaccaggatgtgagtgacaaactgagcctccgattccctgggttatacatagtgggacaaagagacttactattcaactataagagattctttgtaagcttgttgcatggggtcctaacatcgatgatcctcttcttcatacctcttggagcttatctgcaaaccgtagggcaggatggagaggcaccttccgactaccagtcttttgccgtcaccattgcctctgctcttgtaataacagtcaatttccagattggcttggatacttcttattggacttttgtgaatgctttttcaatttttggaagcattgcactttattttggcatcatgtttgactttcatagtgctggaatacatgttctctttccatctgcatttcaatttacaggcacagcttcaaacgctctgagacagccatacatttggttaactatcatcctgactgttgctgtgtgcttactacccgtcgttgccattcgattcctgtcaatgaccatctggccatcagaaagtgataagatccagaagcatcgcaagcggttgaaggcggaggagcagtggcagcgacggcagcaggtgttccgccggggcgtgtcaacgcggcgctcggcctacgccttctcgcaccagcggggctacgcggacctcatctcctccgggcgcagcatccgcaagaagcgctcgccgcttgatgccatcgtggcggatggcaccgcggagtacaggcgcaccggggacagctga

SEQ ID NO: 70 - protein, 1251 aa, Homo sapiens
MSTERDSETTFDEDSQPNDEVVPYSDDETEDELDDQGSAVEPEQNRVNREAEENREPFRKECTWQVKANDRKYHEQPHFMNTKFLCIKESKYANNAIKTYKYNAFTFIPMNLFEQFKRAANLYFLALLILQAVPQISTLAWYTTLVPLLVVLGVTAIKDLVDDVARHKMDKEINNRTCEVIKDGRFKVAKWKEIQVGDVIRLKKNDFVPADILLLSSSEPNSLCYVETAELDGETNLKFKMSLEITDQYLQREDTLATFDGFIECEEPNNRLDKFTGTLFWRNTSFPLDADKILLRGCVIRNTDFCHGLVIFAGADTKIMKNSGKTRFKRTKIDYLMNYMVYTIFVVLILLSAGLAIGHAYWEAQVGNSSWYLYDGEDDTPSYRGFLIFWGYIIVLNTMVPISLYVSVEVIRLGQSHFINWDLQMYYAEKDTPAKARTTTLNEQLGQIHYIFSDKTGTLTQNIMTFKKCCINGQIYGDHRDASQHNHNKIEQVDFSWNTYADGKLAFYDHYLIEQIQSGKEPEVRQFFFLLAVCHTVMVDRTDGQLNYQAASPDEGALVNAARNFGFAFLARTQNTITISELGTERTYNVLAILDFNSDRKRMSIIVRTPEGNIKLYCKGADTVIYERLHRMNPTKQETQDALDIFANETLRTLCLCYKEIEEKEFTEWNKKFMAASVASTNRDEALDKVYEEIEKDLILLGATAIEDKLQDGVPETISKLAKADIKIWVLTGDKKETAENIGFACELLTEDTTICYGEDINSLLHARMENQRNRGGVYAKFAPPVQESFFPPGGNRALIITGSWLNEILLEKKTKRNKILKLKFPRTEEERRMRTQSKRRLEAKKEQRQKNFVDLACECSAVICCRVTPKQKAMVVDLVKRYKKAITLAIGDGANDVNMIKTAHIGVGISGQEGMQAVMSSDYSFAQFRYLQRLLLVHGRWSYIRMCKFLRYFFYKNFAFTLVHFWYSFFNGYSAQTAYEDWFITLYNVLYTSLPVLLMGLLDQDVSDKLSLRFPGLYIVGQRDLLFNYKRFFVSLLHGVLTSMILFFIPLGAYLQTVGQDGEAPSDYQSFAVTIASALVITVNFQIGLDTSYWTFVNAFSIFGSIALYFGIMFDFHSAGIHVLFPSAFQFTGTASNALRQPYIWLTIILTVAVCLLPVVAIRFLSMTIWPSESDKIQKHRKRLKAEEQWQRRQQVFRRGVSTRRSAYAFSHQRGYADLISSGRSIRKKRSPLDAIVADGTAEYRRTGDS

SEQ ID NO: 71 - DNA, 1394 bp, Homo sapiens
ggggatacggaaaacagaatagaagcacagaacaaggactattgtatataagagaagcaggtgttaatgtaagttgctgtggaatgactgttttcaagaagagagaaggagccaatatatctactttcattaagaagctgaaattaaatttggatttccttctttccaaagctgagacacgatggccaaaaagcgattgctgtgattggagctggaattagcggactgggggccatcaagtgctgcctggatgaagatctggagcccacctgctttgaaagaaatgatgatattggacatctctggaaatttcaaaaaaatacttcagagaaaatgcctagtatctacaaatctgtgaccatcaatacttccaaggagatgatgtgcttcagtgacttccctgtccctgatcattttcccaactacatgcacaactccaaactcatggactacttcgggatgtatgccacacactttggcctcctgaattacattcgttttaagactgaagtgcaaagtgtgaggaagcacccagatttttctatcaatggacaatgggatgttgttgtggagactgaagagaaacaagagactttggtctttgatggggtcttagtttgcagtggacaccacacagatccctacttaccacttcagtccttcccaggcattgagaaatttgaaggctgttatttccatagtcgggaatacaaaagtcccgaggacttttcagggaaaagaatcatagtgatcggcattggaaattctggagtggatattgcggtggagctcagtcgtgtagcaaaacagatttgaccagtaggaactgagattcaacgtccccaagactgcaaaagtacctacaatcaaacaaattaatatatttcctaattggatcagcatgcagacaagtttacaaatatattacagaaagatttgaagagggattctggttacgttcagttaagcaggacactaatcctgaacaatctgatgtattaaagtttctaatgtttgtatctttggtttgatgcatacaatagagtggaagtctgtagtagttaatatgatgataattcgcttctaaatttaaatccttatttatatatgaagcatagctatgtcaatgtccagggaagcatttttaaatagtaaatcagaaacatgtaaactagtgaatacaattttctatttttcattcagaaatttgttgtcatagatgcagcctttatctggaaatcagtgggcagctctggtcaagcacagcatggcgaccactgtgtagtattttaccacctaatccttagtagccaacactgttaaatctgcataatgggtagcatatgaataaaataatatcttgtaaaaaaaaaaaaaaaaaaaaaaaaaaaaaa

SEQ ID NO: 72 - protein, 160 aa, Homo sapiens
MPSIYKSVTINTSKEMMCFSDFPVPDHFPNYMHNSKLMDYFGMYATHFGLLNYIRFKTEVQSVRKHPDFSINGQWDVVVETEEKQETLVFDGVLVCSGHHTDPYLPLQSFPGIEKFEGCYFHSREYKSPEDFSGKRIIVIGIGNSGVDIAVELSRVAKQI

SEQ ID NO: 73 - DNA, 1152 bp, Homo sapiens
atgagtgcacttttccttggtgtgggagtgagggcagaggaagctggagcgagggtgcaacaaaacgttccaagtgggacagatactggagatcctcaaagtaagcccctcggtgactgggctgctggcaccatggacccagagagcagtatctttattgaggatgccattaagtatttcaaggaaaaagtgagcacacagaatctgctactcctgctgactgataatgaggcctggaacggattcgtggctgctgctgaactgcccaggaatgaggcagatgagctccgtaaagctctggacaaccttgcaagacaaatgatcatgaaagacaaaaactggcacgataaaggccagcagtacagaaactggtttctgaaagagtttcctcggttgaaaagtgagcttgaggataacataagaaggctccgtgcccttgcagatggggttcagaaggtccacaaaggcaccaccatcgccaatgtggtgtctggctctctcagcatttcctctggcatcctgaccctcgtcggcatgggtctggcacccttcacagagggaggcagccttgtactcttggaacctgggatggagttgggaatcacagccgctttgaccgggattaccagcagtaccatggactacggaaagaagtggtggacacaagcccaagcccacgacctggtcatcaaaagccttgacaaattgaaggaggtgagggagtttttgggtgagaacatatccaactttctttccttagctggcaatacttaccaactcacacgaggcattgggaaggacatccgtgccctcagacgagccagagccaatcttcagtcagtaccgcatgcctcagcctcacgcccccgggtcactgagccaatctcagctgaaagcggtgaacaggtggagagggttaatgaacccagcatcctggaaatgagcagaggagtcaagctcacggatgtggcccctgtaagcttctttcttgtgctggatgtagtctacctcgtgtacgaatcaaagcacttacatgagggggcaaagtcagagacagctgaggagctgaagaaggtggctcaggagctggaggagaagctaaacattctcaacaataattataagattctgcaggcggaccaagaactgtga

SEQ ID NO: 74 - protein, 383 aa, Homo sapiens
MSALFLGVGVRAEEAGARVQQNVPSGTDTGDPQSKPLGDWAAGTMDPESSIFIEDAIKYFKEKVSTQNLLLLLTDNEAWNGFVAAAELPRNEADELRKALDNLARQMIMKDKNWHDKGQQYRNWFLKEFPRLKSELEDNIRRLRALADGVQKVHKGTTIANVVSGSLSISSGILTLVGMGLAPFTEGGSLVLLEPGMELGITAALTGITSSTMDYGKKWWTQAQAHDLVIKSLDKLKEVREFLGENISNFLSLAGNTYQLTRGIGKDIRALRRARANLQSVPHASASRPRVTEPISAESGEQVERVNEPSILEMSRGVKLTDVAPVSFFLVLDVVYLVYESKHLHEGAKSETAEELKKVAQELEEKLNILNNNYKILQADQEL

SEQ ID NO: 75 - DNA, 1968 bp, Homo sapiens
atggggacctctccgagcagcagcaccgccctcgcctcctgcagccgcatcgcccgccgagccacagccacgatgatcgcgggctcccttctcctgcttggattccttagcaccaccacagctcagccagaacagaaggcctcgaatctcattggcacataccgccatgttgaccgtgccaccggccaggtgctaacctgtgacaagtgtccagcaggaacctatgtctctgagcattgtaccaacacaagcctgcgcgtctgcagcagttgccctgtggggacctttaccaggcatgagaatggcatagagaaatgccatgactgtagtcagccatgcccatggccaatgattgagaaattaccttgtgctgccttgactgaccgagaatgcacttgcccacctggcatgttccagtctaacgctacctgtgccccccatacggtgtgtcctgtgggttggggtgtgcggaagaaagggacagagactgaggatgtgcggtgtaagcagtgtgctcggggtaccttctcagatgtgccttctagtgtgatgaaatgcaaagcatacacagactgtctgagtcagaacctggtggtgatcaagccggggaccaaggagacagacaacgtctgtggcacactcccgtccttctccagctccacctcaccttcccctggcacagccatctttccacgccctgagcacatggaaacccatgaagtcccttcctccacttatgttcccaaaggcatgaactcaacagaatccaactcttctgcctctgttagaccaaaggtactgagtagcatccaggaagggacagtccctgacaacacaagctcagcaagggggaaggaagacgtgaacaagaccctcccaaaccttcaggtagtcaaccaccagcaaggcccccaccacagacacatcctgaagctgctgccgtccatggaggccactgggggcgagaagtccagcacgcccatcaagggccccaagaggggacatcctagacagaacctacacaagcattttgacatcaatgagcatttgccctggatgattgtgcttttcctgctgctggtgcttgtggtgattgtggtgtgcagtatccggaaaagctcgaggactctgaaaaaggggccccggcaggatcccagtgccattgtggaaaaggcagggctgaagaaatccatgactccaacccagaaccgggagaaatggatctactactgcaatggccatggtatcgatatcctgaagcttgtagcagcccaagtgggaagccagtggaaagatatctatcagtttctttgcaatgccagtgagagggaggttgctgctttctccaatgggtacacagccgaccacgagcgggcctacgcagctctgcagcactggaccatccggggccccgaggccagcctcgcccagctaattagcgccctgcgccagcaccggagaaacgatgttgtggagaagattcgtgggctgatggaagacaccacccagctggaaactgacaaactagctctcccgatgagccccagcccgcttagcccgagccccatccccagccccaacgcgaaacttgagaattccgctctcctgacggtggagccttccccacaggacaagaacaagggcttcttcgtggatgagtcggagccccttctccgctgtgactctacatccagcggctcctccgcgctgagcaggaacggttcctttattaccaaagaaaagaaggacacagtgttgcggcaggtacgcctggacccctgtgacttgcagcctatctttgatgacatgctccactttctaaatcctgaggagctgcgggtgattgaagagattccccaggctgaggacaaactagaccggctattcgaaattattggagtcaagagccaggaagccagccagaccctcctggactctgtttatagccatcttcctgacctgctgtag

SEQ ID NO: 76 - protein, 655 aa, Homo sapiens
MGTSPSSSTALASCSRIARRATATMIAGSLLLLGFLSTTTAQPEQKASNLIGTYRHVDRATGQVLTCDKCPAGTYVSEHCTNTSLRVCSSCPVGTFTRHENGIEKCHDCSQPCPWPMIEKLPCAALTDRECTCPPGMFQSNATCAPHTVCPVGWGVRKKGTETEDVRCKQCARGTFSDVPSSVMKCKAYTDCLSQNLVVIKPGTKETDNVCGTLPSFSSSTSPSPGTAIFPRPEHMETHEVPSSTYVPKGMNSTESNSSASVRPKVLSSIQEGTVPDNTSSARGKEDVNKTLPNLQVVNHQQGPHHRHILKLLPSMEATGGEKSSTPIKGPKRGHPRQNLHKHFDINEHLPWMIVLFLLLVLVVIVVCSIRKSSRTLKKGPRQDPSAIVEKAGLKKSMTPTQNREKWIYYCNGHGIDILKLVAAQVGSQWKDIYQFLCNASEREVAAFSNGYTADHERAYAALQHWTIRGPEASLAQLISALRQHRRNDVVEKIRGLMEDTTQLETDKLALPMSPSPLSPSPIPSPNAKLENSALLTVEPSPQDKNKGFFVDESEPLLRCDSTSSGSSALSRNGSFITKEKKDTVLRQVRLDPCDLQPIFDDMLHFLNPEELRVIEEIPQAEDKLDRLFEIIGVKSQEASQTLLDSVYSHLPDLL

SEQ ID NO: 77 - DNA, 6906 bp, Homo sapiens
ggcgcgggcggcctggagccccgggagcggcgcgcgcggtcccggcccagccggctctcctggcctcgcgctgcacattctctcctggcggcggcgccacctgcagtagcgttcgcccgaacatggcgacacggagcagcaggagggagtcgcgactcccgttcctattcaccctggtcgcactgctgccgcccggagctctctgcgaagtctggacgcagaggctgcacggcggcagcgcgcccttgccccaggaccggggcttcctcgtggtgcagggcgacccgcgcgagctgcggctgtgggcgcgcggggatgccaggggggcgagccgcgcggacgagaagccgctccggaggaaacggagcgctgccctgcagcccgagcccatcaaggtgtacggacaggttagtctgaatgattcccacaatcagatggtggtgcactgggctggagagaaaagcaacgtgatcgtggccttggcccgagatagcctggcattggcgaggcccaagagcagtgatgtgtacgtgtcttacgactatggaaaatcattcaagaaaatttcagacaagttaaactttggcttgggaaataggagtgaagctgttatcgcccagttctaccacagccctgcggacaacaagcggtacatctttgcagacgcttatgcccagtacctctggatcacgtttgacttctgcaacactcttcaaggcttttccatcccatttcgggcagctgatctcctcctacacagtaaggcctccaaccttctcttgggctttgacaggtcccaccccaacaagcagctgtggaagtcagatgactttggccagacctggatcatgattcaggaacatgtcaagtccttttcttggggaattgatccctatgacaaaccaaataccatctacattgaacgacacgaaccctctggctactccactgtcttccgaagtacagatttcttccagtcccgggaaaaccaggaagtgatccttgaggaagtgagagattttcagcttcgggacaagtacatgtttgctacaaaggtggtgcatctcttgggcagtgaacagcagtcttctgtccagctctgggtctcctttggccggaagcccatgagagcagcccagtttgtcacaagacatcctattaatgaatattacatcgcagatgcctccgaggaccaggtgtttgtgtgtgtcagccacagtaacaaccgcaccaatttatacatctcagaggcagaggggctgaagttctccctgtccttggagaacgtgctctattacagcccaggaggggccggcagtgacaccttggtgaggtattttgcaaatgaaccatttgctgacttccaccgagtggaaggattgcaaggagtctacattgctactctgattaatggttctatgaatgaggagaacatgagatcggtcatcacctttgacaaagggggaacctgggagtttcttcaggctccagccttcacgggatatggagagaaaatcaattgtgagctttcccagggctgttcccttcatctggctcagcgcctcagtcagctcctcaacctccagctccggagaatgcccatcctgtccaaggagtcggctccaggcctcatcatcgccactggctcagtgggaaagaacttggctagcaagacaaacgtgtacatctctagcagtgctggagccaggtggcgagaggcacttcctggacctcactactacacatggggagaccacggcggaatcatcacggccattgcccagggcatggaaaccaacgagctaaaatacagtaccaatgaaggggagacctggaaaacattcatcttctctgagaagccagtgtttgtgtatggcctcctcacagaacctggggagaagagcactgtcttcaccatctttggctcgaacaaagagaatgtccacagctggctgatcctccaggtcaatgccacggatgccttgggagttccctgcacagagaatgactacaagctgtggtcaccatctgatgagcgggggaatgagtgtttgctgggacacaagactgttttcaaacggcggaccccccatgccacatgcttcaatggagaggactttgacaggccggtggtcgtgtccaactgctcctgcacccgggaggactatgagtgtgacttcggtttcaagatgagtgaagatttgtcattagaggtttgtgttccagatccggaattttctggaaagtcatactcccctcctgtgccttgccctgtgggttctacttacaggagaacgagaggctaccggaagatttctggggacacttgtagcggaggagatgttgaagcgcgactggaaggagagctggtcccctgtcccctggcagaagagaacgagttcattctgtatgctgtgaggaaatccatctaccgctatgacctggcctcgggagccaccgagcagttgcctctcaccgggctacgggcagcagtggccctggactttgactatgagcacaactgtttgtattggtccgacctggccttggacgtcatccagcgcctctgtttgaatggaagcacagggcaagaggtgatcatcaattctggcctggagacagtagaagctttggcttttgaacccctcagccagctgctttactgggtagatgcaggcttcaaaaagattgaggtagctaatccagatggcgacttccgactcacaatcgtcaattcctctgtgcttgatcgtcccagggctctggtcctcgtgccccaagagggggtgatgttctggacagactggggagacctgaagcctgggatttatcggagcaatatggatggttctgctgcctatcacctggtgtctgaggatgtgaagtggcccaatggcatctctgtggacgaccagtggatttactggacggatgcctacctggagtgcatagagcggatcacgttcagtggccagcagcgctctgtcattctggacaacctcccgcacccctatgccattgctgtctttaagaatgaaatctactgggatgactggtcacagctcagcatattccgagcttccaaatacagtgggtcccagatggagattctggcaaaccagctcacggggctcatggacatgaagattttctacaaggggaagaacactggaagcaatgcctgtgtgcccaggccatgcagcctgctgtgcctgcccaaggccaacaacagtagaagctgcaggtgtccagaggatgtgtccagcagtgtgcttccatcaggggacctgatgtgtgactgccctcagggctatcagctcaagaacaatacctgtgtcaaagaagagaacacctgtcttcgcaaccagtatcgctgcagcaacgggaactgtatcaacagcatttggtggtgtgactttgacaacgactgtggagacatgagcgatgagagaaactgccctaccaccatctgtgacctggacacccagtttcgttgccaggagtctgggacttgtatcccactgtcctataaatgtgaccttgaggatgactgtggagacaacagtgatgaaagtcattgtgaaatgcaccagtgccggagtgacgagtacaactgcagttccggcatgtgcatccgctcctcctgggtatgtgacggggacaacgactgcagggactggtctgatgaagccaactgtaccgccatctatcacacctgtgaggcctccaacttccagtgccgaaacgggcactgcatcccccagcggtgggcgtgtgacggggatacggactgccaggatggttccgatgaggatccagtcaactgtgagaagaagtgcaatggattccgctgcccaaacggcacttgcatcccatccagcaaacattgtgatggtctgcgtgattgctctgatggctccgatgaacagcactgcgagcccctctgtacgcacttcatggactttgtgtgtaagaaccgccagcagtgcctgttccactccatggtctgtgacggaatcatccagtgccgcgacgggtccgatgaggatgcggcgtttgcaggatgctcccaagatcctgagttccacaaggtatgtgatgagttcggtttccagtgtcagaatggagtgtgcatcagtttgatttggaagtgcgacgggatggatgattgcggcgattattctgatgaagccaactgcgaaaaccccacagaagccccaaactgctcccgctacttccagtttcggtgtgagaatggccactgcatccccaacagatggaaatgtgacagggagaacgactgtggggactggtctgatgagaaggattgtggagattcacatattcttcccttctcgactcctgggccctccacgtgtctgcccaattactaccgctgcagcagtgggacctgcgtgatggacacctgggtgtgcgacgggtaccgagattgtgcagatggctctgacgaggaagcctgccccttgcttgcaaacgtcactgctgcctccactcccacccaacttgggcgatgtgaccgatttgagttcgaatgccaccaaccgaagacgtgtattcccaactggaagcgctgtgacggccaccaagattgccaggatggccgggacgaggccaattgccccacacacagcaccttgacttgcatgagcagggagttccagtgcgaggacggggaggcctgcattgtgctctcggagcgctgcgacggcttcctggactgctcggacgagagcgatgaaaaggcctgcagtgatgagttgactgtgtacaaagtacagaatcttcagtggacagctgacttctctggggatgtgactttgacctggatgaggcccaaaaaaatgccctctgcttcttgtgtatataatgtctactacagggtggttggagagagcatatggaagactctggagacccacagcaataagacaaacactgtattaaaagtcttgaaaccagataccacgtatcaggttaaagtacaggttcagtgtctcagcaaggcacacaacaccaatgactttgtgaccctgaggaccccagagggattgccagatgcccctcgaaatctccagctgtcactccccagggaagcagaaggtgtgattgtaggccactgggctcctcccatccacacccatggcctcatccgtgagtacattgtagaatacagcaggagtggttccaagatgtgggcctcccagagggctgctagtaactttacagaaatcaagaacttattggtcaacactctatacaccgtcagagtggctgcggtgactagtcgtggaataggaaactggagcgattctaaatccattaccaccataaaaggaaaagtgatcccaccaccagatatccacattgacagctatggtgaaaattatctaagcttcaccctgaccatggagagtgatatcaaggtgaatggctatgtggtgaaccttttctgggcatttgacacccacaagcaagagaggagaactttgaacttccgaggaagcatattgtcacacaaagttggcaatctgacagctcatacatcctatgagatttctgcctgggccaagactgacttgggggatagccctctggcatttgagcatgttatgaccagaggggttcgcccacctgcacctagcctcaaggccaaagccatcaaccagactgcagtggaatgtacctggaccggcccccggaatgtggtttatggtattttctatgccacgtcctttcttgacctctatcgcaacccgaagagcttgactacttcactccacaacaagacggtcattgtcagtaaggatgagcagtatttgtttctggtccgtgtagtggtaccctaccaggggccatcctctgactacgttgtagtgaagatgatcccggacagcaggcttccaccccgtcacctgcatgtggttcatacgggcaaaacctccgtggtcatcaagtgggaatcaccgtatgactctcctgaccaggacttgttgtatgcaattgcagtcaaagatctcataagaaagactgacaggagctacaaagtaaaatcccgtaacagcactgtggaatacacccttaacaagttggagcctggcgggaaataccacatcattgtccaactggggaacatgagcaaagattccagcataaaaattaccacagtttcattatcagcacctgatgccttaaaaatcataacagaaaatgatcatgttcttctgttttggaaaagcctggctttaaaggaaaagcattttaatgaaagcaggggctatgagatacacatgtttgatagtgccatgaatatcacagcttaccttgggaatactactgacaatttctttaaaatttccaacctgaagatgggtcataattacacgttcaccgtccaagcaagatgcctttttggcaaccagatctgtggggagcctgccatcctgctgtacgatgagctggggtctggtgcagatgcatctgcaacgcaggctgccagatctacggatgttgctgctgtggtggtgcccatcttattcctgatactgctgagcctgggggtggggtttgccatcctgtacacgaagcaccggaggctgcagagcagcttcaccgccttcgccaacagccactacagctccaggctggggtccgcaatcttctcctctggggatgacctgggggaagatgatgaagatgcccctatgataactggattttcagatgacgtccccatggtgatagcctgaaagagctttcctcactagaaaccaaatggtgtaaatattttatttgataaagatagttgatggtttattttaaaagatgcactttgagttgcaatatgttatttttatatgggccaaaaacaaaaaacaaaaaaaaaaa

SEQ ID NO: 78 - protein, 2214 aa, Homo sapiens
MATRSSRRESRLPFLFTLVALLPPGALCEVWTQRLHGGSAPLPQDRGFLVVQGDPRELRLWARGDARGASRADEKPLRRKRSAALQPEPIKVYGQVSLNDSHNQMVVHWAGEKSNVIVALARDSLALARPKSSDVYVSYDYGKSFKKISDKLNFGLGNRSEAVIAQFYHSPADNKRYIFADAYAQYLWITFDFCNTLQGFSIPFRAADLLLHSKASNLLLGFDRSHPNKQLWKSDDFGQTWIMIQEHVKSFSWGIDPYDKPNTIYIERHEPSGYSTVFRSTDFFQSRENQEVILEEVRDFQLRDKYMFATKVVHLLGSEQQSSVQLWVSFGRKPMRAAQFVTRHPINEYYIADASEDQVFVCVSHSNNRTNLYISEAEGLKFSLSLENVLYYSPGGAGSDTLVRYFANEPFADFHRVEGLQGVYIATLINGSMNEENMRSVITFDKGGTWEFLQAPAFTGYGEKINCELSQGCSLHLAQRLSQLLNLQLRRMPILSKESAPGLIIATGSVGKNLASKTNVYISSSAGARWREALPGPHYYTWGDHGGIITAIAQGMETNELKYSTNEGETWKTFIFSEKPVFVYGLLTEPGEKSTVFTIFGSNKENVHSWLILQVNATDALGVPCTENDYKLWSPSDERGNECLLGHKTVFKRRTPHATCFNGEDFDRPVVVSNCSCTREDYECDFGFKMSEDLSLEVCVPDPEFSGKSYSPPVPCPVGSTYRRTRGYRKISGDTCSGGDVEARLEGELVPCPLAEENEFILYAVRKSIYRYDLASGATEQLPLTGLRAAVALDFDYEHNCLYWSDLALDVIQRLCLNGSTGQEVIINSGLETVEALAFEPLSQLLYWVDAGFKKIEVANPDGDFRLTIVNSSVLDRPRALVLVPQEGVMFWTDWGDLKPGIYRSNMDGSAAYHLVSEDVKWPNGISVDDQWIYWTDAYLECIERITFSGQQRSVILDNLPHPYAIAVFKNEIYWDDWSQLSIFRASKYSGSQMEILANQLTGLMDMKIFYKGKNTGSNACVPRPCSLLCLPKANNSRSCRCPEDVSSSVLPSGDLMCDCPQGYQLKNNTCVKEENTCLRNQYRCSNGNCINSIWWCDFDNDCGDMSDERNCPTTICDLDTQFRCQESGTCIPLSYKCDLEDDCGDNSDESHCEMHQCRSDEYNCSSGMCIRSSWVCDGDNDCRDWSDEANCTAIYHTCEASNFQCRNGHCIPQRWACDGDTDCQDGSDEDPVNCEKKCNGFRCPNGTCIPSSKHCDGLRDCSDGSDEQHCEPLCTHFMDFVCKNRQQCLFHSMVCDGIIQCRDGSDEDAAFAGCSQDPEFHKVCDEFGFQCQNGVCISLIWKCDGMDDCGDYSDEANCENPTEAPNCSRYFQFRCENGHCIPNRWKCDRENDCGDWSDEKDCGDSHILPFSTPGPSTCLPNYYRCSSGTCVMDTWVCDGYRDCADGSDEEACPLLANVTAASTPTQLGRCDRFEFECHQPKTCIPNWKRCDGHQDCQDGRDEANCPTHSTLTCMSREFQCEDGEACIVLSERCDGFLDCSDESDEKACSDELTVYKVQNLQWTADFSGDVTLTWMRPKKMPSASCVYNVYYRVVGESIWKTLETHSNKTNTVLKVLKPDTTYQVKVQVQCLSKAHNTNDFVTLRTPEGLPDAPRNLQLSLPREAEGVIVGHWAPPIHTHGLIREYIVEYSRSGSKMWASQRAASNFTEIKNLLVNTLYTVRVAAVTSRGIGNWSDSKSITTIKGKVIPPPDIHIDSYGENYLSFTLTMESDIKVNGYVVNLFWAFDTHKQERRTLNFRGSILSHKVGNLTAHTSYEISAWAKTDLGDSPLAFEHVMTRGVRPPAPSLKAKAINQTAVECTWTGPRNVVYGIFYATSFLDLYRNPKSLTTSLHNKTVIVSKDEQYLFLVRVVVPYQGPSSDYVVVKMIPDSRLPPRHLHVVHTGKTSVVIKWESPYDSPDQDLLYAIAVKDLIRKTDRSYKVKSRNSTVEYTLNKLEPGGKYHIIVQLGNMSKDSSIKITTVSLSAPDALKIITENDHVLLFWKSLALKEKHFNESRGYEIHMFDSAMNITAYLGNTTDNFFKISNLKMGHNYTFTVQARCLFGNQICGEPAILLYDELGSGADASATQAARSTDVAAVVVPILFLILLSLGVGFAILYTKHRRLQSSFTAFANSHYSSRLGSAIFSSGDDLGEDDEDAPMITGFSDDVPMVIA

SEQ ID NO: 79 - DNA, 2297 bp, Homo sapiens
cctgccactcccctgccagtgtgcgaggcagcgtgaagctggggcctgctccccgcagcctctggagcgcatctcagaccttctgagacctatgttgctggccccccagaacccgcaacatggcagatggggcaaaggccaaccccaaagggttcaaaaagaaggtgctggatagatgcttctctgggtggaggggcccacgcttcggggcctcctgtccttcaagaacctccaggtctagcctgggtatgaagaagttcttcaccgtggccatccttgctggcagcgttctgtccacagctcacggcagcctgctcaacctgaaggccatggtggaggccgtcacagggaggagcgccatcctgtccttcgtgggctacggttgctactgtgggctggggggccgtggccagcccaaggatgaggtggactggtgctgccacgcccacgactgctgctaccaggaactctttgaccaaggctgtcacccctatgtggaccactatgatcacaccatcgagaacaacactgagatagtctgcagtgacctcaacaagacagagtgtgacaagcagacatgcatgtgtgacaagaacatggttctgtgcctcatgaaccagacgtaccgagaggagtaccgtggcttcctcaatgtctactgccagggccccacgcccaactgcagcatctatgaaccgccccctgaggaggtcacctgcagtcaccaatccccagcgccccccgcccctccctagagcctctgaggtttgagagagagagcgggaggagggtctggcttggggaccagacgaggtgcagggagggtaggagccaggccaggagcctgagggttgctggttgcctcctccctggagctctccagtgagggctcagctctcagaggactcaggaaggcctgggtcctgactcccccagcccagccccaggcatgggtgcctcctgctgctggttctggactgggtgggaggcacggagcttataggggtctctcctgagggtggccggggagacctgagagagaggaggaggggcctctgagtggggcctctgttgctggcgccagtttaactccccggagccttagaaagtctgagccttagaaagtctgggcctgagcatccaggcccagagctggatgcatcctcggcccaagatcacaggaaggcagattgctggtcacaaagcatgggttccgggagcccctcagctgatcccacaggatggcctggggtggtggctactttgggcttgaagctctctagagccccattcacagagcaggtgccccaccccagccctcactgaggtggccatgagtccaggttcagaccctaggggatgtgcagtgctgagtgtcccagccctgaagtctagcctcagagcaggctcctgggcactgacagagccacacacccaggtacaccccccaggctaatatggggacacacaaaaatatggccttcaacacctacaagtcttctctgtgtcccccatcgacccatgcacatcaccccaaccctgctctgccacaccacgtgggtctgaggagcactcctaccccccggctccgggtccctgacagacactgccctcctggcctgcacctggaatggcagccagaacactggagggggacccacaccctctctccctgggctgtggatgggtgttgcaagtcccatccctcctggcctgcacctggaacagcagccagaacaccggagggggacccacaccctctctccctgggctgtgggcaggcgtcacaagtcccattggtggggaagaggctgagggctgagacccacctcagtgaagagggaaacgtaagcagggagagcatcaaggcgggaggcagcctggaaacttctagaagagggtcaaggtaggaggctacatggaagcttctagaaggcagtaaggaacagggtggtgaaggagaggggagaagatgggagcatggagagacgaggtgagtgacagccaccagcagggacgggcctccaggcaacacagaggagctgggggccagggccttacggggctgggttcctgtgtggggcgtggagctggggctgaagtggaggggacggccctgcggcccccagcactgttgtttctccaggtgcaccttaccttcctccttacctgcccgagcctcaactcagggtcagcagcctccacggagccagccccacctgcccgaaaaccactgaagccaccctccgcccgacgtcaacggggatccactagtttagagcgcggcccccgcgtgc

SEQ ID NO: 80 - protein, 211 aa, Homo sapiens
MADGAKANPKGFKKKVLDRCFSGWRGPRFGASCPSRTSRSSLGMKKFFTVAILAGSVLSTAHGSLLNLKAMVEAVTGRSAILSFVGYGCYCGLGGRGQPKDEVDWCCHAHDCCYQELFDQGCHPYVDHYDHTIENNTEIVCSDLNKTECDKQTCMCDKNMVLCLMNQTYREEYRGFLNVYCQGPTPNCSIYEPPPEEVTCSHQSPAPPAPP

SEQ ID NO: 81 - DNA, 2414 bp, Homo sapiens
gaaatctgtacgaactattcaggctgcttttagaggcatgaaagttagacaaaaattgaaaaatgtatcagaggaaaagatggcagccattgttaaccaatctgcactctgctgttacagaagcaaaactcagtatgaagctgttcaaagtgaaggtgttatgattcaagagtggtataaagcttctggccttgcttgttcacaggaagcagagtatcattctcaaagtagggctgcagtaacaattcaaaaagctttttgtagaatggtcacaagaaaactggaaacacagaaatgtgctgccctacggattcagttcttccttcagatggctgtgtatcggagaagatttgttcagcagaaaagagctgctatcactttacagcattattttaggacgtggcaaaccagaaaacagtttttactatatagaaaagcagcagtggttttacaaaatcactacagagcatttctgtctgcaaaacatcaaagacaagtctatttacagatcagaagcagtgttatcattattcaagctagaagtaaaggatttatacagaaacggaagtttcaggaaattaaaaatagcaccataaaaattcaggctatgtggaggagatatagagccaagaaatatttatgtaaagtgaaagctgcctgcaagattcaagcctggtatagatgttggagagcacacaaagaatatctagctgtattaaaagctgttaaaattattcaaggttgcttctataccaaactagagagaacacggtttttgaatgtgagagcatcagcaattatcattcagagaaaatggagagctatacttcctgcaaagatagctcatgaacacttcttaatgataaaaagacatcgagctgcttgtttgatccaagcacattatagaggatataaaggaaggcaggtctctcttcggcagaaatctgctgctttgatcatacaaaaatatatacgagccagggaggctggaaagcatgaaaggataaaatatattgaatttaaaaaatctacagttatcctacaagcactggtgcgtggttggctagtacgaaaaagatttttagaacagagagccaaaattcgacttcttcacttcactgcagctgcatattatcacctgaatgctgttagaattcaaagagcctataaactttacctggctgtgaagaatgctaacaagcaggttaattcagtcatctgtattcagagatggtttcgagcaagattacaagaaaagagatttattcagaaatatcatagcatcaaaaagattgagcatgaaggtcaagaatgtctgagccagcgaaatagggctgcatcagtaatacagaaagcagtgcgccattttctcctccgtaaaaagcaggaaaaattcactagtggaatcattaaaattcaggcattatggagaggctattcttggaggaagaaaaatgattgtacaaaaattaaagctatacgactaagtcttcaagttgttaatagggagattcgagaagaaaacaaactctacaaaagaactgcacttgcacttcattaccttttgacatataagcacctttctgccattcttgaggccttaaaacacctagaggtagttactagattgtctccactttgttgtgagaacatggcccagagtggagcaatttctaaaatatttgttttgatccgaagttgtaatcgcagtattccttgtatggaagtcatcagatatgctgtgcaagtcttgcttaatgtatctaagtatgagaaaactacttcagcagtttatgatgtagaaaattgtatagatatactattggagcttttgcagatataccgagaaaagcctggtaataaagttgcagacaaaggcggaagcatttttacaaaaacttgttgtttgttggctattttactgaagacaacaaatagagcctctgatgtacgaagtaggtccaaagttgttgaccgtatttacagtctctacaaacttacagctcataaacataaaatgaatactgaaagaatactttacaagcaaaagaagaattcttctataagcattccttttatcccagaaacacctgtaaggaccagaatagtttcaagacttaagccagattgggttttgagaagagataacatggaagaaatcacaaatcccctgcaagctattcaaatggtgatggatacgcttggcattccttattagtaaatgtaaacattttcagtatgtatagtgtaaagaaatattaaagccaatcatgagtacgtaaagtgatttttgctctctgtgtacaacttttaaaatctgactttgttttaaaaaaacataaactgttcattacattcttcatttttatcatttatagttttatgcatgtaataaactaatatgtcataagatg

SEQ ID NO: 82 - protein, 726 aa, Homo sapiens
MKVRQKLKNVSEEKMAAIVNQSALCCYRSKTQYEAVQSEGVMIQEWYKASGLACSQEAEYHSQSRAAVTIQKAFCRMVTRKLETQKCAALRIQFFLQMAVYRRRFVQQKRAAITLQHYFRTWQTRKQFLLYRKAAVVLQNHYRAFLSAKHQRQVYLQIRSSVIIIQARSKGFIQKRKFQEIKNSTIKIQAMWRRYRAKKYLCKVKAACKIQAWYRCWRAHKEYLAVLKAVKIIQGCFYTKLERTRFLNVRASAIIIQRKWRAILPAKIAHEHFLMIKRHRAACLIQAHYRGYKGRQVSLRQKSAALIIQKYIRAREAGKHERIKYIEFKKSTVILQALVRGWLVRKRFLEQRAKIRLLHFTAAAYYHLNAVRIQRAYKLYLAVKNANKQVNSVICIQRWFRARLQEKRFIQKYHSIKKIEHEGQECLSQRNRAASVIQKAVRHFLLRKKQEKFTSGIIKIQALWRGYSWRKKNDCTKIKAIRLSLQVVNREIREENKLYKRTALALHYLLTYKHLSAILEALKHLEVVTRLSPLCCENMAQSGAISKIFVLIRSCNRSIPCMEVIRYAVQVLLNVSKYEKTTSAVYDVENCIDILLELLQIYREKPGNKVADKGGSIFTKTCCLLAILLKTTNRASDVRSRSKVVDRIYSLYKLTAHKHKMNTERILYKQKKNSSISIPFIPETPVRTRIVSRLKPDWVLRRDNMEEITNPLQAIQMVMDTLGIPY

SEQ ID NO: 83 - DNA, 1356 bp, Homo sapiens
ttctcccgcaaccttcccttcgctccctcccgtcccccccagctcctagcctccgactccctccccccctcacgcccgccctctcgccttcgccgaaccaaagtggattaattacacgctttctgtttctctccgtgctgttctctcccgctgtgcgcctgcccgcctctcgctgtcctctctccccctcgccctctcttcggcccccccctttcacgttcactctgtctctcccactatctctgcccccctctatccttgatacaacagctgacctcatttcccgataccttttcccccccgaaaagtacaacatctggcccgccccagcccgaagacagcccgtcctccctggacaatcagacgaattctccccccccccccaaaaaaaaaagccatccccccgctctgccccgtcgcacattcggcccccgcgactcggccagagcggcgctggcagaggagtgtccggcaggagggccaacgcccgctgttcggtttgcgacacgcagcagggaggtgggcggcagcgtcgccggcttccagacaccaatgggaatcccaatggggaagtcgatgctggtgcttctcaccttcttggccttcgcctcgtgctgcattgctgcttaccgccccagtgagaccctgtgcggcggggagctggtggacaccctccagttcgtctgtggggaccgcggcttctacttcagcaggcccgcaagccgtgtgagccgtcgcagccgtggcatcgttgaggagtgctgtttccgcagctgtgacctggccctcctggagacgtactgtgctacccccgccaagtccgagagggacgtgtcgacccctccgaccgtgcttccggacaacttccccagataccccgtgggcaagttcttccaatatgacacctggaagcagtccacccagcgcctgcgcaggggcctgcctgccctcctgcgtgcccgccggggtcacgtgctcgccaaggagctcgaggcgttcagggaggccaaacgtcaccgtcccctgattgctctacccacccaagaccccgcccacgggggcgcccccccagagatggccagcaatcggaagtgagcaaaactgccgcaagtctgcagcccggcgccaccatcctgcagcctcctcctgaccacggacgtttccatcaggttccatcccgaaaatctctcggttccacgtccccctggggcttctcctgacccagtccccgtgccccgcctccccgaaacaggctactctcctcggccccctccatcgggctgaggaagcacagcagcatcttcaaacatgtacaaaatcgattggctttaaacacccttcacataccctcccccc

SEQ ID NO: 84 - protein, 180 aa, Homo sapiens
MGIPMGKSMLVLLTFLAFASCCIAAYRPSETLCGGELVDTLQFVCGDRGFYFSRPASRVSRRSRGIVEECCFRSCDLALLETYCATPAKSERDVSTPPTVLPDNFPRYPVGKFFQYDTWKQSTQRLRRGLPALLRARRGHVLAKELEAFREAKRHRPLIALPTQDPAHGGAPPEMASNRK

SEQ ID NO: 85 - DNA, 5352 bp, Homo sapiens
atgactgaagccattacagaagcagcagtagcctcaagtgaggaggtgtcagaggaaagagacgacctggggcctcttgaattacatgacagtggtacctttcaacaagtcgtgaaccttctggacatcattgacagcgagtcagcaaagacggacacaacaggggcaggccttgacatgcggaagaccctggcctcggtgataatcatggagaaggccaccactgagccttctgtagtgataaacactctcatccgctgcctgcaggtgccagagatttccacccagcgcaaggtcaacatttacaacatcctccaggacatcatccagcaggagggggagctggaggagcagtgcgtgcagaggctggtggccattgcctccaaggagatgagggagatcccagagatggagggctatatgaaggcagaggtggccagcgacacactggtggctctgtcccgaaaccacttcagcttggtcatgtacgagctgcagcaccacctcaagcccctcaacctcactgatgaatttgtcatcatcacactggccaagctggccaacggcaatgtgtttgagttcatgccatacatgggcatcaccctggctaccatattcaccatgctgagacttgccaatgaagccaagatacgccaggcgatctgcagtgccatggagaccttctgtgagacggtgcagttttatctgaagcacctggaggagagcgtgtaccccgtgatgactgaggaggagtttgccctgaaggtgttccccatgtatcgctacttcgtgacagtgtggctgaggcactacaaccccgaggtgaagctgggggtgatcaagtccctgaagcccatgctcggcctccttctgcccaacgatgacctgcgggagcaggtctacgactacatccccctgctgctggcggagtaccagggcagtctggaggtcttgaggcagatcctggaactgtcagtcaccaccaacacccctgtcccccaaatgcagctacacaccattttcacagaactgcacgtccaggtgtgcaacaaggccccggcccagcatcagtacagcagccagaatctgatggagatggtgcactgcttcgtagcccttgctcgctcctaccccaaggagctgatgaagttcttcttcagccagatggagacaaacaaggaggccgtccgcgtggggactctgaatctgattagggctatagtgagcgcagatgagcccaggatgagtatcagggccatctacctggctatccgggtagtcaagaacaccatctctgatacccggtccaaggtgaggatggctattctccacatcattgggcagttggctctctgtggctaccaggagagaatcaaaggctggggcctgaagtacctgtctgtgcagctgaccttatccacctacaaactgacaaatcgccgggagaagttttatcagagggacttggaggagaggatggtccacaaagtcaccatggacactgtgaagatcattacctcttctgtcagtgggatgaccaccgagttttgggtgaggctgctgtgctacatcatggagacagactacgtggaagctttgactcctatctgtatcagcctcacaaacctggcagaacaccagctccatggccaggatgtggatgtcagcgtggctggcaagagcaggcaagtggacctgcctgcacctcagaagctgctggcccgtctcctggtgctgatgtcatcaccttacaagggggagggtcgtgggatagccatgctcaacctcttgaggaccctgagccagagcatcgcaccctccatggccgacatgtgggagctggagattgcgctactggtccggtacctggaagaacatactgagttcacttgggatcagaaagcctgggaagacaagctgattcagtttctgcgaaactccctcaagaagacccgggggtctagctggagcctgcgcttgagtaaagagctgaacaaccagattgcgagctttgacagcccctctctggagaagggctttctgtaccgggccttgggcttcaccttggccacaggcctggaggccagcaaggtggaggtcctgctgttggagctgctgtacaagacggactacagcaatgactttgacagcgagggtgtgattatgtgctttggcctgtgtgcccggggccaggtaaaaacggtgctgaatgtgcttcatgacttcgaggagaggatccaggagtcagagcagtcctggcagatcagtgcttggcggaaggaccatccctggaggcgggagacagtgaaaagtgccctcatggtgatgtatagctgcgtggcctcctactgccacccccagttgctcctcaacctcgtggacagccccatcaccgctaagatcattcaccattatgtcagcagctgccaggacatctgtctcaaaatggccttcatgaagagtgttgtgcaggttaccaaggccatcaacaacatcaaggacctggaggactttcactttgcccagaagacgactcttaccagcattatagtggcggtcatcaaggcagaaccgactgacaacctggtttctccagtgcgagccttggcgatggaggccctctcgcacctgagcaagctgaagcctttctactccacagaggaaaacagtgagctgatggatatcagcatacattctgtaatttctctccaactcccaggagaggacaatgagtccattaagaccctgtatgcaaatgccctgagctccctggagcagctgatggagagcctcctgcagaggcagctggaccccaaggggctgcaggagatggtgcagctcctggaaaagtggatcttgtcggagaaagaatgggagcgggaaaaggccgtgagcctccatctctatctcatgtggatttatgtccacagcactgctgtctgtatccacctaaagctggggcagtttggcacaatggtcggactcattgccccgtgcacctgtgatgcccatcaaagaacccgcatggcctcaatgaatgtcctgtccagcctgctagatcttcacgcaagccagacctgctccttgtggggcccttccaagcagaaggagcttgagaaatgtaagggggacctccagagcacagatgtggagaagatcttctgtgcatcctccagaatcgccaaggtggtctgcatggagtttagctgcgatgaggtggtctcgctcatccagaagctctgcgagaacactggggccatgaacctgcagcatgacaaggcctctgtcacctggatagccttcttcctccagatgcgggccaaggagctggaggacaaggtggccgagatcctgagtgccatcctggtgcacctgccggtggtggaccacccagaggtgcggcgccttctcattgacggcatcctgctgctggcgcaccaccaccaggagaccatcctcacatcgctcctgaggcagccactgcccatggagagccacctggcagaggtgtggctggcagtgtcggagaacgtgcccttcgcccggaccatgctccacagcctgatgggccggctgcagtcacggctcagccccagaatcagtgccacctccaaggctgacatctggcgcctggctgcggtggaccccctgatgaccctgtgcaccatccaccttctcattcagaagctggatgagaatgacaagctcccggacttcctccctgacctcatctacaccctcctgctgcagcttggaagcagccaccgaccagaggccgccccgccggtcttgaagatgtggaagctggtccacaccactcctctgccggaggagatgaacctgcaaaggtgctctcgagggcgggtcactatcaagtccatgcagctcttgttcaagagagtcaagagccagcacctggcacataccctggacgagcaggcagtgtgggacctcctgcaggacggcgggacattcctggagggtgtgagcctgctggccaggctgtgcatgcagcacgtggagggccacaggcagaggctggccgagctggtgctcaggggcatggactcagaagtcctgagctgccgcatcagcagcacagcggtctgcgtggaaatgaggcaccggttcatgagcggcccagttctgtaccaggagaagctgctgaagccggcagctttgctgctggagaagggtgccgaccaggaggaagacgaggccctgcgggtgctgtccctgcgcgccctcggcaacatggccctgggcgcccccaagaaggtgaagcagtaccggaaggtcttgctggagaagtgcctgggccccctgagggagcccgtgagcaacagcgtgactgccgagggcatggaggccctgaccaagatcctggctgagctccgggaaggggatgtggggtcctctttcgacgccatgtctgagcagtgcaggatcttcttcgacaacgagagcgagctgctgcgtctgaaagccttcatcctctttggaaagctggcaagggtggtcgggatgtccaagaagcatttcttcaaaggggaggtgaagaaggcctggatccccctcatgctgcactcccaggacccctgctccaatgcagcccaagtaagatacatcctgggctttgtgtcccagtctggggcccgctgttccccgaggaaacaggtccttgggtctgctggctcggcctgtatggctaccatgtttcagtgtgtgcacttctggggctggaagtccctggagcatccctcagggccaagtgataccgctactgatgacaagatgaccgttttccagacaaccatgtgctccatcctgactcggaaaaagccggctgttctctaccgcttcttgctagaaacaatggcctatgttaaaaataacttgtcaagaatcagaatcgctgcttgcaacttggcaggaattattatgaagcagatgtctacacattatctgaaaaagctggacttcccagcattacggaattccctccaggaactacagctggacccggatcccgggcccactggcccaaagggtcggaaactagctttgtgtcttcactcggagttcatccacacgcatgctgacagcgtgcctaaggccaggcactgtgccaagcgagcaggtaaaccaggacttccaaactgttcccagtccaactgccaaaggaattcaccatccggggtcccatcaacaggagagagctgctatgctgtccaaaatccaacccgtgctaaagccttctctggaacagtggtcttcaaactgttttgtggagcaaatggtgacttgatttcctgcccagtgataaagagtattgctgctaaacaagcttga

SEQ ID NO: 86 - protein, 1783 aa, Homo sapiens
MTEAITEAAVASSEEVSEERDDLGPLELHDSGTFQQVVNLLDIIDSESAKTDTTGAGLDMRKTLASVIIMEKATTEPSVVINTLIRCLQVPEISTQRKVNIYNILQDIIQQEGELEEQCVQRLVAIASKEMREIPEMEGYMKAEVASDTLVALSRNHFSLVMYELQHHLKPLNLTDEFVIITLAKLANGNVFEFMPYMGITLATIFTMLRLANEAKIRQAICSAMETFCETVQFYLKHLEESVYPVMTEEEFALKVFPMYRYFVTVWLRHYNPEVKLGVIKSLKPMLGLLLPNDDLREQVYDYIPLLLAEYQGSLEVLRQILELSVTTNTPVPQMQLHTIFTELHVQVCNKAPAQHQYSSQNLMEMVHCFVALARSYPKELMKFFFSQMETNKEAVRVGTLNLIRAIVSADEPRMSIRAIYLAIRVVKNTISDTRSKVRMAILHIIGQLALCGYQERIKGWGLKYLSVQLTLSTYKLTNRREKFYQRDLEERMVHKVTMDTVKIITSSVSGMTTEFWVRLLCYIMETDYVEALTPICISLTNLAEHQLHGQDVDVSVAGKSRQVDLPAPQKLLARLLVLMSSPYKGEGRGIAMLNLLRTLSQSIAPSMADMWELEIALLVRYLEEHTEFTWDQKAWEDKLIQFLRNSLKKTRGSSWSLRLSKELNNQIASFDSPSLEKGFLYRALGFTLATGLEASKVEVLLLELLYKTDYSNDFDSEGVIMCFGLCARGQVKTVLNVLHDFEERIQESEQSWQISAWRKDHPWRRETVKSALMVMYSCVASYCHPQLLLNLVDSPITAKIIHHYVSSCQDICLKMAFMKSVVQVTKAINNIKDLEDFHFAQKTTLTSIIVAVIKAEPTDNLVSPVRALAMEALSHLSKLKPFYSTEENSELMDISIHSVISLQLPGEDNESIKTLYANALSSLEQLMESLLQRQLDPKGLQEMVQLLEKWILSEKEWEREKAVSLHLYLMWIYVHSTAVCIHLKLGQFGTMVGLIAPCTCDAHQRTRMASMNVLSSLLDLHASQTCSLWGPSKQKELEKCKGDLQSTDVEKIFCASSRIAKVVCMEFSCDEVVSLIQKLCENTGAMNLQHDKASVTWIAFFLQMRAKELEDKVAEILSAILVHLPVVDHPEVRRLLIDGILLLAHHHQETILTSLLRQPLPMESHLAEVWLAVSENVPFARTMLHSLMGRLQSRLSPRISATSKADIWRLAAVDPLMTLCTIHLLIQKLDENDKLPDFLPDLIYTLLLQLGSSHRPEAAPPVLKMWKLVHTTPLPEEMNLQRCSRGRVTIKSMQLLFKRVKSQHLAHTLDEQAVWDLLQDGGTFLEGVSLLARLCMQHVEGHRQRLAELVLRGMDSEVLSCRISSTAVCVEMRHRFMSGPVLYQEKLLKPAALLLEKGADQEEDEALRVLSLRALGNMALGAPKKVKQYRKVLLEKCLGPLREPVSNSVTAEGMEALTKILAELREGDVGSSFDAMSEQCRIFFDNESELLRLKAFILFGKLARVVGMSKKHFFKGEVKKAWIPLMLHSQDPCSNAAQVRYILGFVSQSGARCSPRKQVLGSAGSACMATMFQCVHFWGWKSLEHPSGPSDTATDDKMTVFQTTMCSILTRKKPAVLYRFLLETMAYVKNNLSRIRIAACNLAGIIMKQMSTHYLKKLDFPALRNSLQELQLDPDPGPTGPKGRKLALCLHSEFIHTHADSVPKARHCAKRAGKPGLPNCSQSNCQRNSPSGVPSTGESCYAVQNPTRAKAFSGTVVFKLFCGANGDLISCPVIKSIAAKQA

SEQ ID NO: 87 - DNA, 738 bp, Homo sapiens
cacttctccctctccttagttctccggtaaccaaaccttctctcgttatatacccaatgataaaaccaaagtaatgttgtacaggttaaagattcaaaacaaaccatagcaactgaaacagggtatcaggacgcaaatgcttggctggaatggattaaacattctgttgcaggctaaacaaaagcgcctgttacacttgtgtgacaggcaggccagagacccaaattgttccctttccacttgggtggtcctctcacagaccgggcatgagctgtgtggtagctctcttccagaaccccacagcctggggtggtgagtcatgcaagactctttcactgctgttccctgaggtcaagagccctgcaggtcagccctgaggactatccggcctccagcccctgatgttaacttcacctcatgcctttcacggcagggggaaaagttagcattccttggagacttaacagggtgcagtgaaaccaggccttttgaagagcttaccaatcagtctgcccttgttcatccccgagcagatgtgtggtggtattgctggggactactgctgggtactctgccaagtaattagagcagcactcatgctctagtccaactggccatccctttcaccctagcattctgtcaatatgataaaaaaaaatgtaaagaagtgcctcacgtgggtccttgacccccatgtttatataaacactattgggttctatgaggagaacccgatga

SEQ ID NO: 88 - DNA, 759 bp, Homo sapiens
atgcaggaagaaacaggctggcagcttggggaaaggattcttacataccacggcgaccaggtaactctgtgcacagacccagaagaaagtagaaaaataagttttggaggaaacctcattgtgaacacacctcaccaggtcagaactatcctaagtcagaaagcagaaaggtggcttactgactccagaatcttaaagtatgaggctattctcttagaaaaagatgatttaacattaaccactgataattcacttaacccagcaggtttcctaacaggggatctatatcaaaagagagagcacacatgtttagttttaattaattaccatacaaaggtccgaccagacctaggagaaactcccttcaggacgggacaacactttatagatggttcctcccaggtgatagagggaaaaagatacaatgggtattcagtaattgatagagaaactcttgtagaaatagagttaggaaaattgcctaataattggtctgctcaaacatgtgagctgtttgcactcagccaagccttaaaggacttacagaaccaggaaggaaccatctatacagattctaagtacgcctttggagtggctcatacatttggaaaaatttggactgaacgaggtcttattaatagcaaatgccaagacttggtccataaggaattaatcacccaagtattaactaaccttcagctgccaaaagaaacagctattgaccatgtccccggacaccaaaaaagcctttctttttaa

SEQ ID NO: 89 - protein, 252 aa, Homo sapiens
MQEETGWQLGERILTYHGDQVTLCTDPEESRKISFGGNLIVNTPHQVRTILSQKAERWLTDSRILKYEAILLEKDDLTLTTDNSLNPAGFLTGDLYQKREHTCLVLINYHTKVRPDLGETPFRTGQHFIDGSSQVIEGKRYNGYSVIDRETLVEIELGKLPNNWSAQTCELFALSQALKDLQNQEGTIYTDSKYAFGVAHTFGKIWTERGLINSKCQDLVHKELITQVLTNLQLPKETAIDHVPGHQKSLSF

SEQ ID NO: 90 - DNA, 1279 bp, Homo sapiens; identical to SEQ ID NO: 28

SEQ ID NO: 91 - protein, 196 aa, Homo sapiens; identical to SEQ ID NO: 29

SEQ ID NO: 92 - DNA, 1224 bp, Homo sapiens
ggccgggagagtagcagtgccttggaccccagctctcctccccctttctctctaaggatggcccagaaggagaactcctacccctggccctacggccgacagacggctccatctggcctgagcaccctgccccagcgagtcctccggaaagagcctgtcaccccatctgcacttgtcctcatgagccgctccaatgtccagcccacagctgcccctggccagaaggtgatggagaatagcagtgggacacccgacatcttaacgcggcacttcacaattgatgactttgagattgggcgtcctctgggcaaaggcaagtttggaaacgtgtacttggctcgggagaagaaaagccatttcatcgtggcgctcaaggtcctcttcaagtcccagatagagaaggagggcgtggagcatcagctgcgcagagagatcgaaatccaggcccacctgcaccatcccaacatcctgcgtctctacaactatttttatgaccggaggaggatctacttgattctagagtatgccccccgcggggagctctacaaggagctgcagaagagctgcacatttgacgagcagcgaacagccacgatcatggaggagttggcagatgctctaatgtactgccatgggaagaaggtgattcacagagacataaagccagaaaatctgctcttagggctcaagggagagctgaagattgctgacttcggctggtctgtgcatgcgccctccctgaggaggaagacaatgtgtggcaccctggactacctgcccccagagatgattgaggggcgcatgcacaatgagaaggtggatctgtggtgcattggagtgctttgctatgagctgctggtggggaacccaccctttgagagtgcatcacacaacgagacctatcgccgcatcgtcaaggtggacctaaagttccccgcttctgtgcccacgggagcccaggacctcatctccaaactgctcaggcataacccctcggaacggctgcccctggcccaggtctcagcccacccttgggtccgggccaactctcggagggtgctgcctccctctgcccttcaatctgtcgcctgatggtccctgtcattcactcgggtgcgtgtgtttgtatgtctgtgtatgtataggggaaagaagggatccctaactgttcccttatctgttttctacctcctcctttgtttaataaaggctgaagctttttgt

SEQ ID NO: 93 - protein, 344 aa, Homo sapiens
MAQKENSYPWPYGRQTAPSGLSTLPQRVLRKEPVTPSALVLMSRSNVQPTAAPGQKVMENSSGTPDILTRHFTIDDFEIGRPLGKGKFGNVYLAREKKSHFIVALKVLFKSQIEKEGVEHQLRREIEIQAHLHHPNILRLYNYFYDRRRIYLILEYAPRGELYKELQKSCTFDEQRTATIMEELADALMYCHGKKVIHRDIKPENLLLGLKGELKIADFGWSVHAPSLRRKTMCGTLDYLPPEMIEGRMHNEKVDLWCIGVLCYELLVGNPPFESASHNETYRRIVKVDLKFPASVPTGAQDLISKLLRHNPSERLPLAQVSAHPWVRANSRRVLPPSALQSVA

SEQ ID NO: 94 - DNA, 783 bp, Homo sapiens
ggcacgagcgagttcctgtctctctgccaacgccgcccggatggcttcccaaaaccgcgacccagccgccactagcgtcgccgccgcccgtaaaggagctgagccgagcgggggcgccgcccggggtccggtgggcaaaaggctacagcaggagctgatgaccctcatgatgtctggcgataaagggatttctgccttccctgaatcagacaaccttttcaaatgggtagggaccatccatggagcagctggaacagtatatgaagacctgaggtataagctctcgctagagttccccagtggctacccttacaatgcgcccacagtgaagttcctcacgccctgctatcaccccaacgtggacacccagggtaacatatgcctggacatcctgaaggaaaagtggtctgccctgtatgatgtcaggaccattctgctctccatccagagccttctaggagaacccaacattgatagtcccttgaacacacatgctgccgagctctggaaaaaccccacagcttttaagaagtacctgcaagaaacctactcaaagcaggtcaccagccaggagccctgacccaggctgcccagcctgtccttgtgtcgtctttttaatttttccttagatggtctgtcctttttgtgatttctgtataggactctttatcttgagctgtggtatttttgttttgtttttgtcttttaaattaagcctcggttgagcccttgtatattaaataaatgcatttttgtccttttttaaaaaaaaaaaaaaaaaaa

SEQ ID NO: 95 - protein, 179 aa, Homo sapiens
MASQNRDPAATSVAAARKGAEPSGGAARGPVGKRLQQELMTLMMSGDKGISAFPESDNLFKWVGTIHGAAGTVYEDLRYKLSLEFPSGYPYNAPTVKFLTPCYHPNVDTQGNICLDILKEKWSALYDVRTILLSIQSLLGEPNIDSPLNTHAAELWKNPTAFKKYLQETYSKQVTSQEP

SEQ ID NO: 96 - DNA, 2450 bp, Homo sapiens
agaacggcttccggcgggagctgtgcagctccttatcatggggacaattcatctctttcgaaaaccacaaagatccttttttggcaagttgttacgggaatttagacttgtagcagctgaccgaaggtcctggaagatactgctctttggtgtaataaacttgatatgtactggcttcctgcttatgtggtgcagttctactaatagtatagctttaactgcctatacttacctgaccatttttgatctttttagtttaatgacatgtttaataagttactgggtaacattgaggaaacctagccctgtctattcatttgggtttgaaagattagaagtcctggctgtatttgcctccacagtcttggcacagttgggagctctctttatattaaaagaaagtgcagaacgctttttggaacagcccgagatacacacgggaagattattagttggtacttttgtggctctttgtttcaacctgttcacgatgctttctattcggaataaaccttttgcttatgtctcagaagctgctagtacgagctggcttcaagagcatgttgcagatcttagtcgaagcttgtgtggaattattccgggacttagcagtatcttccttccccgaatgaatccatttgttttgattgatcttgctggagcatttgctctttgtattacatatatgctcattgaaattaataattattttgccgtagacactgcctctgctatagctattgccttgatgacatttggcactatgtatcccatgagtgtgtacagtgggaaagtcttactccagacaacaccaccccatgttattggtcagttggacaaactcatcagagaggtatctaccttagatggagttttagaagtccgaaatgaacatttttggaccctaggttttggctcattggctggatcagtgcatgtaagaattcgacgagatgccaatgaacaaatggttcttgctcatgtgaccaacaggctgtacactctagtgtctactctaactgttcaaattttcaaggatgactggattaggcctgccttattgtctgggcctgttgcagccaatgtcctaaacttttcagatcatcacgtaatcccaatgcctcttttaaagggtactgatgatttgaacccagttacatcaactccagctaaacctagtagtccacctccagaattttcatttaacactcctgggaaaaatgtgaacccagttattcttctaaacacacaaacaaggccttatggttttggtctcaatcatggacacacaccttacagcagcatgcttaatcaaggacttggagttccaggaattggagcaactcaaggattgaggactggttttacaaatataccaagtagatatggaactaataatagaattggacaaccaagaccatgatagactctaacttatttttataaggaatattgactccttggcttccaatttatttagtaatccaactttgcattgactgtttaatcatttactctaaatgttagataatagtagtcttgttcacatttcatgaaacctatgaaactatatttttgtaaaatgtatttgtgacagtgaaatcctcgtaaatgttaaaggctttaaataggcttcctttagaaaatgtgtttctttaaatttggattttggtatctttggttttgtagttgactgcagtgtgatgtgaccttacctttataagagccacttgatggagtagatctgtcacattactaagatacgatatttctttttttttccgagacggagtcttgctctgccactgtgcccggccaatacattattattaacttaaggctgtactttattaaggcttccttagtttttgttttgttttgttttttgagatggagtctcactctgtcgcccaggctggaatgcagtggcatgatctcagctcactgcaacctctgcctcctgagttcaaatgattctcctgcctcagcctcccgagtagctgggattacaggcacctgccaccacgcccagctaatttttgtatttttagtaaagacgggggatttcaccatgttggccaggctggtcttgaactcctgacctcatgatccacccaccttagcctcccaaagtgctgggattaggtgtgagccaccgcacctggccgatattttctttaatgaaatttataaatatgcttcttgaataatacacattttgggaaagggaaaaatgtctgttcaaaaagtaaaggtctcttttatagcttttccaaacttaattgctaaatttttctttgaggttctcctgaattatgtcttacaaactaaaagcaaaaatttttagcagaaattttggaatacattctatctagcacaatttgaatttttaattatcaagatttttgttaaagtttctctcctttaaaaattttagtacatttgtaaat

SEQ ID NO: 97 - protein, 461 aa, Homo sapiens
MGTIHLFRKPQRSFFGKLLREFRLVAADRRSWKILLFGVINLICTGFLLMWCSSTNSIALTAYTYLTIFDLFSLMTCLISYWVTLRKPSPVYSFGFERLEVLAVFASTVLAQLGALFILKESAERFLEQPEIHTGRLLVGTFVALCFNLFTMLSIRNKPFAYVSEAASTSWLQEHVADLSRSLCGIIPGLSSIFLPRMNPFVLIDLAGAFALCITYMLIEINNYFAVDTASAIAIALMTFGTMYPMSVYSGKVLLQTTPPHVIGQLDKLIREVSTLDGVLEVRNEHFWTLGFGSLAGSVHVRIRRDANEQMVLAHVTNRLYTLVSTLTVQIFKDDWIRPALLSGPVAANVLNFSDHHVIPMPLLKGTDDLNPVTSTPAKPSSPPPEFSFNTPGKNVNPVILLNTQTRPYGFGLNHGHTPYSSMLNQGLGVPGIGATQGLRTGFTNIPSRYGTNNRIGQPRP

SEQ ID NO: 98 - DNA, 531 bp, Homo sapiens
atggacttaaccaatgcttcacaaataccaagaaaaaaatatttcaatgtgataaatataggaaagtttttcataaattttcaaattcaaactgacataagagaagacatacgggaaaaaagacctttcaaatgtatagaatgtggcaaagcttttaacaagttttcaacccttactacacataagaaaattcatactagagagaaaccctacaaatgtgaagaatgtggcaaagccttcaactggtcctcataccttactatacataagagaattcatactggagagaaactctacaaatgtgaagaatgtggcaaagccttcaactggtcctcataccttactgcatataagataactcatactagagagaaaccctacaaatgtgaagaatgtggcaaagcctttaagtactcctcgaacctcactacacataagataattcatactggagagcatctctacaagtgtgaagaatgtggcaaagcgtttaaccatgctgcatgcttctttgtcattttgaagatttga

SEQ ID NO: 99 - DNA, 531 bp, Homo sapiens; identical to SEQ ID NO: 98

SEQ ID NO: 100 - protein, 176 aa, Homo sapiens [sequence omitted]

SEQ ID NO: 101 - DNA, 537 bp, Homo sapiens
ggcacgaggtcttgttatgcaaataggcttcccacttggcaggggccgtcttgtccactcgtttctgtaaacatgggtggcaaaaagagaagatggagctgccatttagaacatgcctaatcccagcttcatcttgctgagcaaaaatgaaggagcctggacccaactttgttactgtgagaaagggtcttcattcattcaagatggcatttgttaagcacctactgctggagtgcagtggttcaatcacggatcactgcagcctccacctcccagttcaagaaattctcatgtctcagcctcctgagcagctaggattacagacaaaccttggaaatcaagaaagttctggaatgatgaagctgttcatgccaagaccgaaagtgctggcccagtatgagtccattcagttcatgccgtgacaattttcttggaactcctttttattgttagttctcacttgtttccatatttagtgaatgtacatttaattgcaaagctgtcattaataaaaattcttatagtacctcactgcac

SEQ ID NO: 102 - protein, 91 aa, Homo sapiens
MKEPGPNFVTVRKGLHSFKMAFVKHLLLECSGSITDHCSLHLPVQEILMSQPPEQLGLQTNLGNQESSGMMKLFMPRPKVLAQYESIQFMP

SEQ ID NO: 103 - DNA, 890 bp, Homo sapiens
ggcggaccgaagaacgcaggaagggggccggggggacccgcccccggccggccgcagccatgaactccaacgtggagaacctacccccgcacatcatccgcctggtgtacaaggaggtgacgacactgaccgcagacccacccgatggcatcaaggtctttcccaacgaggaggacctcaccgacctccaggtcaccatcgagggccctgaggggaccccatatgctggaggtctgttccgcatgaaactcctgctggggaaggacttccctgcctccccacccaagggctacttcctgaccaagatcttccacccgaacgtgggcgccaatggcgagatctgcgtcaacgtgctcaagagggactggacggctgagctgggcatccgacacgtactgctgaccatcaagtgcctgctgatccaccctaaccccgagtctgcactcaacgaggaggcgggccgcctgctcttggagaactacgaggagtatgcggctcgggcccgtctgctcacagagatccacgggggcgccggcgggcccagcggcagggccgaagccggtcgggccctggccagtggcactgaagcttcctccaccgaccctggggccccagggggcccgggaggggctgagggtcccatggccaagaagcatgctggcgagcgcgataagaagctggcggccaagaaaaagacggacaagaagcgggcgctgcgggcgctgcggcggctgtagtgggctctcttcctccttccaccgtgaccccaacctctcctgtcccctccctccaactctgtctctaagttatttaaattatggctggggtcggggagggtacagggggcactgggacctggatttgtttttctaaataaagttggaaaagca

SEQ ID NO: 104 - protein, 225 aa, Homo sapiens
MNSNVENLPPHIIRLVYKEVTTLTADPPDGIKVFPNEEDLTDLQVTIEGPEGTPYAGGLFRMKLLLGKDFPASPPKGYFLTKIFHPNVGANGEICVNVLKRDWTAELGIRHVLLTIKCLLIHPNPESALNEEAGRLLLENYEEYAARARLLTEIHGGAGGPSGRAEAGRALASGTEASSTDPGAPGGPGGAEGPMAKKHAGERDKKLAAKKKTDKKRALRALRRL

SEQ ID NO: 105 - DNA, 634 bp, Homo sapiens
cggctgagaggcagcgaactcatctttgccagtacaggagcttgtgccgtggcccacagcccacagcccacagccatgggctgggacctgacggtgaagatgctggcgggcaacgaattccaggtgtccctgagcagctccatgtcggtgtcagagctgaaggcgcagatcacccagaagattggcgtgcacgccttccagcagcgtctggctgtccacccgagcggtgtggcgctgcaggacagggtcccccttgccagccagggcctgggccctggcagcacggtcctgctggtggtggacaaatgcgacgaacctctgagcatcctggtgaggaataacaagggccgcagcagcacctacgaggtccggctgacgcagaccgtggcccacctgaagcagcaagtgagcgggctggagggtgtgcaggacgacctgttctggctgaccttcgaggggaagcccctggaggaccagctcccgctgggggagtacggcctcaagcccctgagcaccgtgttcatgaatctgcgcctgcggggaggcggcacagagcctggcgggcggagctaagggcctccaccagcatccgagcaggatcaagggccggaaataaaggctgttgtaagagaat

SEQ ID NO: 106 - protein, 165 aa, Homo sapiens
MGWDLTVKMLAGNEFQVSLSSSMSVSELKAQITQKIGVHAFQQRLAVHPSGVALQDRVPLASQGLGPGSTVLLVVDKCDEPLSILVRNNKGRSSTYEVRLTQTVAHLKQQVSGLEGVQDDLFWLTFEGKPLEDQLPLGEYGLKPLSTVFMNLRLRGGGTEPGGRS

SEQ ID NO: 107 - DNA, 1161 bp, Homo sapiens
atgaatcggcaccatctgcaggatcactttctggaaatagacaagaagaactgctgtgtgttccgagatgacttcattgccaaggtgttgccgccggtgttggggctggagtttatctttgggcttctgggcaatggccttgccctgtggattttctgtttccacctcaagtcctggaaatccagccggattttcctgttcaacctggcagtagctgactttctactgatcatctgcctgccgttcgtgatggactactatgtgcggcgttcagactggaagtttggggacatcccttgccggctggtgctcttcatgtttgccatgaaccgccagggcagcatcatcttcctcacggtggtggcggtagacaggtatttccgggtggtccatccccaccacgccctgaacaagatctccaattggacagcagccatcatctcttgccttctgtggggcatcactgttggcctaacagtccacctcctgaagaagaagttgctgatccagaatggccctgcaaatgtgtgcatcagcttcagcatctgccataccttccggtggcacgaagctatgttcctcctggagttcctcctgcccctgggcatcatcctgttctgctcagccagaattatctggagcctgcggcagagacaaatggaccggcatgccaagatcaagagagccatcaccttcatcatggtggtggccatcgtctttgtcatctgcttccttcccagcgtggttgtgcggatccgcatcttctggctcctgcacacttcgggcacgcagaattgtgaagtgtaccgctcggtggacctggcgttctttatcactctcagcttcacctacatgaacagcatgctggaccccgtggtgtactacttctccagcccatcctttcccaacttcttctccactttgatcaaccgctgcctccagaggaagatgacaggtgagccagataataaccgcagcacgagcgtcgagctcacaggggaccccaacaaaaccagaggcgctccagaggcgttaatggccaactccggtgagccatggagcccctcttatctgggcccaacctcaaataaccattccaagaagggacattgtcaccaagaaccagcatctctggagaaacagttgggatgttgcatcgag

SEQ ID NO: 108 - protein, 387 aa, Homo sapiens
MNRHHLQDHFLEIDKKNCCVFRDDFIAKVLPPVLGLEFIFGLLGNGLALWIFCFHLKSWKSSRIFLFNLAVADFLLIICLPFVMDYYVRRSDWKFGDIPCRLVLFMFAMNRQGSIIFLTVVAVDRYFRVVHPHHALNKISNWTAAIISCLLWGITVGLTVHLLKKKLLIQNGPANVCISFSICHTFRWHEAMFLLEFLLPLGIILFCSARIIWSLRQRQMDRHAKIKRAITFIMVVAIVFVICFLPSVVVRIRIFWLLHTSGTQNCEVYRSVDLAFFITLSFTYMNSMLDPVVYYFSSPSFPNFFSTLINRCLQRKMTGEPDNNRSTSVELTGDPNKTRGAPEALMANSGEPWSPSYLGPTSNNHSKKGHCHQEPASLEKQLGCCIE

SEQ ID NO: 109 - DNA, 2213 bp, Homo sapiens
ggcacgagggagcggtgcggaggctctgctcggatcgaggtctgcagcgcagcttcgggagcatgagtgctgcagtgactgcagggaagctggcacgggcaccggccgaccctgggaaagccggggtccccggagttgcagctcccggagctccggcggcggctccaccggcgaaagagatcccggaggtcctagtggacccacgcagccggcggcgctatgtgcggggccgctttttgggcaagggcggctttgccaagtgcttcgagatctcggacgcggacaccaaggaggtgttcgcgggcaagattgtgcctaagtctctgctgctcaagccgcaccagagggagaagatgtccatggaaatatccattcaccgcagcctcgcccaccagcacgtcgtaggattccacggctttttcgaggacaacgacttcgtgttcgtggtgttggagctctgccgccggaggtctctcctggagctgcacaagaggaggaaagccctgactgagcctgaggcccgatactacctacggcaaattgtgcttggctgccagtacctgcaccgaaaccgagttattcatcgagacctcaagctgggcaaccttttcctgaatgaagatctggaggtgaaaataggggattttggactggcaaccaaagtcgaatatgacggggagaggaagaagaccctgtgtgggactcctaattacatagctcccgaggtgctgagcaagaaagggcacagtttcgaggtggatgtgtggtccattgggtgtatcatgtataccttgttagtgggcaaaccaccttttgagacttcttgcctaaaagagacctacctccggatcaagaagaatgaatacagtattcccaagcacatcaaccccgtggccgcctccctcatccagaagatgcttcagacagatcccactgcccgcccaaccattaacgagctgcttaatgacgagttctttacttctggctatatccctgcccgtctccccatcacctgcctgaccattccaccaaggttttcgattgctcccagcagcctggaccccagcaaccggaagcccctcacagtcctcaataaaggcttggagaaccccctgcctgagcgtccccgggaaaaagaagaaccagtggttcgagagacaggtgaggtggtcgactgccacctcagtgacatgctgcagcagctgcacagtgtcaatgcctccaagccctcggagcgtgggctggtcaggcaagaggaggctgaggatcctgcctgcatccccatcttctgggtcagcaagtgggtggactattcggacaagtacggccttgggtatcagctctgtgataacagcgtgggggtgctcttcaatgactcaacacgcctcatcctctacaatgatggtgacagcctgcagtacatagagcgtgacggcactgagtcctacctcaccgtgagttcccatcccaactccttgatgaagaagatcaccctccttaaatatttccgcaattacatgagcgagcacttgctgaaggcaggtgccaacatcacgccgcgcgaaggtgatgagctcgcccggctgccctacctacggacctggttccgcacccgcagcgccatcatcctgcacctcagcaacggcagcgtgcagatcaacttcttccaggatcacaccaagctcatcttgtgcccactgatggcagccgtgacctacatcgacgagaagcgggacttccgcacataccgcctgagtctcctggaggagtacggctgctgcaaggagctggccagccggctccgctacgcccgcactatggtggacaagctgctgagctcacgctcggccagcaaccgtctcaaggcctcctaatagctgccctcccctccggactggtgccctcctcactcccacctgcatctggggcccatactggttggctcccgcggtgccatgtctgcagtgtgccccccagccccggtggctgggcagagctgcatcatccttgcaggtgggggttgctgtgtaagttatttttgtacatgttcgggtgtgggttctacagccttgtccccctccccctcaaccccaccatatgaattgtacagaatatttctattgaattcggaactgtcctttccttggctttatgcacattaaacagatgtgaatattcaaaaaaaaaaaaaaaaaaaaaaaaaaaaaaaaaaa

SEQ ID NO: 110 - protein, 603 aa, Homo sapiens
MSAAVTAGKLARAPADPGKAGVPGVAAPGAPAAAPPAKEIPEVLVDPRSRRRYVRGRFLGKGGFAKCFEISDADTKEVFAGKIVPKSLLLKPHQREKMSMEISIHRSLAHQHVVGFHGFFEDNDFVFVVLELCRRRSLLELHKRRKALTEPEARYYLRQIVLGCQYLHRNRVIHRDLKLGNLFLNEDLEVKIGDFGLATKVEYDGERKKTLCGTPNYIAPEVLSKKGHSFEVDVWSIGCIMYTLLVGKPPFETSCLKETYLRIKKNEYSIPKHINPVAASLIQKMLQTDPTARPTINELLNDEFFTSGYIPARLPITCLTIPPRFSIAPSSLDPSNRKPLTVLNKGLENPLPERPREKEEPVVRETGEVVDCHLSDMLQQLHSVNASKPSERGLVRQEEAEDPACIPIFWVSKWVDYSDKYGLGYQLCDNSVGVLFNDSTRLILYNDGDSLQYIERDGTESYLTVSSHPNSLMKKITLLKYFRNYMSEHLLKAGANITPREGDELARLPYLRTWFRTRSAIILHLSNGSVQINFFQDHTKLILCPLMAAVTYIDEKRDFRTYRLSLLEEYGCCKELASRLRYARTMVDKLLSSRSASNRLKAS

SEQ ID NO: 111 - DNA, 1493 bp, Homo sapiens
ttcctttcatgttcagcatttctactccttccaagaagagcagcaaagctgaagtagcagcaacagcaccagcagcaacagcaaaaaacaaacatgagtgtgaagggcatggctatagccttggctgtgatattgtgtgctacagttgttcaaggcttccccatgttcaaaagaggacgctgtctttgcataggccctggggtaaaagcagtgaaagtggcagatattgagaaagcctccataatgtacccaagtaacaactgtgacaaaatagaagtgattattaccctgaaagaaaataaaggacaacgatgcctaaatcccaaatcgaagcaagcaaggcttataatcaaaaaagttgaaagaaagaatttttaaaaatatcaaaacatatgaagtcctggaaaagggcatctgaaaaacctagaacaagtttaactgtgactactgaaatgacaagaattctacagtaggaaactgagacttttctatggttttgtgactttcaacttttgtacagttatgtgaaggatgaaaggtgggtgaaaggaccaaaaacagaaatacagtcttcctgaatgaatgacaatcagaattccactgcccaaaggagtccagcaattaaatggatttctaggaaaagctaccttaagaaaggctggttaccatcggagtttacaaagtgctttcacgttcttacttgttgtattatacattcatgcatttctaggctagagaaccttctagatttgatgcttacaactattctgttgtgactatgagaacatttctgtctctagaagttatctgtctgtattgatctttatgctatattactatctgtggttacagtggagacattgacattattactggagtcaagcccttataagtcaaaagcatctatgtgtcgtaaagcattcctcaaacattttttcatgcaaatacacacttctttccccaaatatcatgtagcacatcaatatgtagggaaacattcttatgcatcatttggtttgttttataaccaattcattaaatgtaattcataaaatgtactatgaaaaaaattatacgctatgggatactggcaacagtgcacatatttcataaccaaattagcagcaccggtcttaatttgatgtttttcaacttttattcattgagatgttttgaagcaattaggatatgtgtgtttactgtactttttgttttgatccgtttgtataaatgatagcaatatcttggacacatttgaaatacaaaatgtttttgtctaccaaagaaaaatgttgaaaaataagcaaatgtatacctagcaatcacttttactttttgtaattctgtctcttagaaaaatacataatctaatcaatttctttgttcatgcctatatactgtaaaatttaggtatactcaagactagtttaaagaatcaaagtcatttttttctctaataaactaccacaacctttcttttttaaaaaaaaaaa

SEQ ID NO: 112 - protein, 94 aa, Homo sapiens
MSVKGMAIALAVILCATVVQGFPMFKRGRCLCIGPGVKAVKVADIEKASIMYPSNNCDKIEVIITLKENKGQRCLNPKSKQARLIIKKVERKNF

SEQ ID NO: 113 - DNA, 3410 bp, Homo sapiens
gaattcgaggatccgggtaccatgggcggcggcaggcctagcagcacgggaaccgtcccccgcgcgcatgcgcgcgcccctgaagcgcctgggggacgggtatgggcgggaggtaggggcgcggctccgcgtgccagttgggtgcccgcgcgtcacgtggtgaggaaggaggcggaggtctgagtttcgagggagggggggagagaagagggaacgagcaagggaaggaaagcggggaaaggaggaaggaaacgaacgagggggagggaggtccctgttttggaggagctaggagcgttgccggcccctgaagtggagcgagagggaggtgcttcgccgtttctcctgccaggggaggtcccggcttcccgtggaggctccggaccaagccccttcagcttctccctccggatcgatgtgctgctgttaacccgtgaggaggcggcggcggcggcagcggcagcggaagatggtgttgctgagagtgttaattctgctcctctcctgggcggcggggatgggaggtcagtatgggaatcctttaaataaatatatcagacattatgaaggattatcttacaatgtggattcattacaccaaaaacaccagcgtgccaaaagagcagtctcacatgaagaccaatttttacgtctagatttccatgcccatggaagacatttcaacctacgaatgaagagggacacttcccttttcagtgatgaatttaaagtagaaacatcaaataaagtacttgattatgatacctctcatatttacactggacatatttatggtgaagaaggaagttttagccatgggtctgttattgatggaagatttgaaggattcatccagactcgtggtggcacattttatgttgagccagcagagagatatattaaagaccgaactctgccatttcactctgtcatttatcatgaagatgatattaactatccccataaatacggtcctcaggggggctgtgcagatcattcagtatttgaaagaatgaggaaataccagatgactggtgtagaggaagtaacacagatacctcaagaagaacatgctgctaatggtccagaacttctgaggaaaaaacgtacaacttcagctgaaaaaaatacttgtcagctttatattcagactgatcatttgttctttaaatattacggaacacgagaagctgtgattgcccagatatccagtcatgttaaagcgattgatacaatttaccagaccacagacttctccggaatccgtaacatcagtttcatggtgaaacgcataagaatcaatacaactgctgatgagaaggaccctacaaatcctttccgtttcccaaatattggtgtggagaagtttctggaattgaattctgagcagaatcatgatgactactgtttggcctatgtcttcacagaccgagattttgatgatggcgtacttggtctggcttgggttggagcaccttcaggaagctctggaggaatatgtgaaaaaagtaaactctattcagatggtaagaagaagtccttaaacactggaattattactgttcagaactatgggtctcatgtacctcccaaagtctctcacattacttttgctcacgaagttggacataactttggatccccacatgattctggaacagagtgcacaccaggagaatctaagaatttgggtcaaaaagaaaatggcaattacatcatgtatgcaagagcaacatctggggacaaacttaacaacaataaattctcactctgtagtattagaaatataagccaagttcttgagaagaagagaaacaactgttttgttgaatctggccaacctatttgtggaaatggaatggtagaacaaggtgaagaatgtgattgtggctatagtgaccagtgtaaagatgaatgctgcttcgatgcaaatcaaccagagggaagaaaatgcaaactgaaacctgggaaacagtgcagtccaagtcaaggtccttgttgtacagcacagtgtgcattcaagtcaaagtctgagaagtgtcgggatgattcagactgtgcaagggaaggaatatgtaatggcttcacagctctctgcccagcatctgaccctaaaccaaacttcacagactgtaataggcatacacaagtgtgcattaatgggcaatgtgcaggttctatctgtgagaaatatggcttagaggagtgtacgtgtgccagttctgatggcaaagatgataaagaattatgccatgtatgctgtatgaagaaaatggacccatcaacttgtgccagtacagggtctgtgcagtggagtaggcacttcagtggtcgaaccatcaccctgcaacctggatccccttgcaacgattttagaggttactgtgatgttttcatgcggtgcagattagtagatgctgatggtcctctagctaggcttaaaaaagcaatttttagtccagagctctatgaaaacattgctgaatggattgtggctcattggtgggcagtattacttatgggaattgctctgatcatgctaatggctggatttattaagatatgcagtgttcatactccaagtagtaatccaaagttgcctcctcctaaaccacttccaggcactttaaagaggaggagacctccacagcccattcagcaaccccagcgtcagcggccccgagagagttatcaaatgggacacatgagacgctaactgcagcttttgccttggttcttcctagtgcctacaatgggaaaacttcactccaaagagaaacctattaagtcatcatctccaaactaaaccctcacaagtaacagttgaagaaaaaatggcaagagatcatatcctcagaccaggtggaattacttaaattttaaagcctgaaaattccaatttgggggtgggaggtggaaaaggaacccaattttcttatgaacagatatttttaacttaatggcacaaagtcttagaatattattatgtgccccgtgttccctgttcttcgttgctgcattttcttcacttgcaggcaaacttggctctcaataaacttttaccacaaattgaaataaatatatttttttcaactgccaatcaaggctaggaggctcgaccacctcaacattggagacatcacttgccaatgtacataccttgttatatgcagacatgtatttcttacgtacactgtacttctgtgtgcaattgtaaacagaaattgcaatatggatgtttctttgtattataaaatttttccgctcttaattaaaaattactgtttaattgacatactcaggataacagagaatggtggtattcagtggtccaggattctgtaatgctttacacaggcagttttgaaatgaaaatcaatttaccccatggtacccggatcctcgaattc

SEQ ID NO: 114 - protein, 748 aa, Homo sapiens
MVLLRVLILLLSWAAGMGGQYGNPLNKYIRHYEGLSYNVDSLHQKHQRAKRAVSHEDQFLRLDFHAHGRHFNLRMKRDTSLFSDEFKVETSNKVLDYDTSHIYTGHIYGEEGSFSHGSVIDGRFEGFIQTRGGTFYVEPAERYIKDRTLPFHSVIYHEDDINYPHKYGPQGGCADHSVFERMRKYQMTGVEEVTQIPQEEHAANGPELLRKKRTTSAEKNTCQLYIQTDHLFFKYYGTREAVIAQISSHVKAIDTIYQTTDFSGIRNISFMVKRIRINTTADEKDPTNPFRFPNIGVEKFLELNSEQNHDDYCLAYVFTDRDFDDGVLGLAWVGAPSGSSGGICEKSKLYSDGKKKSLNTGIITVQNYGSHVPPKVSHITFAHEVGHNFGSPHDSGTECTPGESKNLGQKENGNYIMYARATSGDKLNNNKFSLCSIRNISQVLEKKRNNCFVESGQPICGNGMVEQGEECDCGYSDQCKDECCFDANQPEGRKCKLKPGKQCSPSQGPCCTAQCAFKSKSEKCRDDSDCAREGICNGFTALCPASDPKPNFTDCNRHTQVCINGQCAGSICEKYGLEECTCASSDGKDDKELCHVCCMKKMDPSTCASTGSVQWSRHFSGRTITLQPGSPCNDFRGYCDVFMRCRLVDADGPLARLKKAIFSPELYENIAEWIVAHWWAVLLMGIALIMLMAGFIKICSVHTPSSNPKLPPPKPLPGTLKRRRPPQPIQQPQRQRPRESYQMGHMRR

SEQ ID NO: 115 - DNA, 1716 bp, Homo sapiens
ggcacgaggggaagacctcctgtcctatcaggccctccccatggctttagagacgatctgccgaccctctgggagaaaatccagcaagatgcaagccttcagaatctgggatgttaaccagaagaccttctatctgaggaacaaccaactagttgccggatacttgcaaggaccaaatgtcaatttagaagaaaagatagatgtggtacccattgagcctcatgctctgttcttgggaatccatggagggaagatgtgcctgtcctgtgtcaagtctggtgatgagaccagactccagctggaggcagttaacatcactgacctgagcgagaacagaaagcaggacaagcgcttcgccttcatccgctcagacagtggccccaccaccagttttgagtctgccgcctgccccggttggttcctctgcacagcgatggaagctgaccagcccgtcagcctcaccaatatgcctgacgaaggcgtcatggtcaccaaattctacttccaggaggacgagtagtactgcccaggcctgcctgttcccattcttgcatggcaaggactgcagggactgccagtccccctgccccagggctcccggctatgggggcactgaggaccagccattgaggggtggaccctcagaaggcgtcacaacaacctggtcacaggactctgcctcctcttcaactgaccagcctccatgctgcctccagaatggtctttctaatgtgtgaatcagagcacagcagcccctgcacaaagcccttccatgtcgcctctgcattcaggatcaaaccccgaccacctgcccaacctgctctcctcttgccactgcctcttcctccctcattccaccttcccatgccctggatccatcaggccacttgatgacccccaaccaagtggctcccacaccctgttttacaaaaaagaaaagaccagtccatgagggaggtttttaagggtttgtggaaaatgaaaattaggatttcatgatttttttttttcagtccccgtgaaggagagcccttcatttggagattatgttctttcggggagaggctgaggacttaaaatattcctgcatttgtgaaatgatggtgaaagtaagtggtagcttttcccttctttttcttctttttttgtgatgtcccaacttgtaaaaattaaaagttatggtactatgttagccccataattttttttttccttttaaaacacttccataatctggactcctctgtccaggcactgctgcccagcctccaagctccatctccactccagattttttacagctgcctgcagtactttacctcctatcagaagtttctcagctcccaaggctctgagcaaatgtggctcctgggggttctttcttcctctgctgaaggaataaattgctccttgacattgtagagcttctggcacttggagacttgtatgaaagatggctgtgcctctgcctgtctcccccaccaggctgggagctctgcagagcaggaaacatgactcgtatatgtctcaggtccctgcagggccaagcacctagcctcgctcttggcaggtactcagcgaatgaatgctgtatatgttgggtgcaaagttccctacttcctgtgacttcagctctgttttacaataaaatcttgaaaatgcctaaaaaaaaaaaaaaaaaaaaaaaaaaaaaaaaaaaaaaaaaaaaaaaaaaaa

SEQ ID NO: 116 - protein, 159 aa, Homo sapiens
MALETICRPSGRKSSKMQAFRIWDVNQKTFYLRNNQLVAGYLQGPNVNLEEKIDVVPIEPHALFLGIHGGKMCLSCVKSGDETRLQLEAVNITDLSENRKQDKRFAFIRSDSGPTTSFESAACPGWFLCTAMEADQPVSLTNMPDEGVMVTKFYFQEDE

SEQ ID NO: 117 - DNA, 832 bp, Homo sapiens
gcactttagctcagtgatggattttaagaacgattacacctgtcgcctgtggtctgactccaggcactcgcgtcaggtacttctgctccaggatagctttatgaattgctctgacagcatcatcaatggttcctttcgtgcgcttggctttattcatgaggctcaggtcggggaaagactgatggtccactgtgacagcaagacaggtaatgcaaatacggatttcatctgggtgggtccagataacagactgctagagccggataaagagatggaaaacttttacgtgtttcacaatggaagtctggttatagaaagccctcgttttgaggatgctggagtgtattcttgtatcgcaatgaataagcaacgcctgttaaatgaaactgtggacgtcacaataaatgtgagcaatttcactgtaagcagatcccatgctcatgaggcatttaacacagcttttaccactcttgctgcttgcgtggccagtatcgttttggtacttttgtacctctatctgactccatgcccctgcaagtgtaaaaccaagagacagaaaaatatgctacaccaaagcaatgcccattcatcgattctcagtcctggccccgctagtgatgcctccgctgatgaacggaaggcaggtgcaggtaaaagagtggtgtttttggaacccctgaaggatactgcagcagggcagaacgggaaagtcaggctctttcccagcgaggcagtgatagctgagggcatcctaaagtccacgagggggaaatctgactcagattcagtcaattcagtgttttctgacacaccttttgtggcgtccacttaa

SEQ ID NO: 118 - DNA, 4568 bp, Homo sapiens
cccattccttgcccagttacacagcactactggacctcagtcacaacaacctgagccgcctgcgggccgagtggacccccacgcgcctgacccaactgcactccctgctgctgagccacaaccacctgaacttcatctcctctgaggccttttccccggtacccaacctgcgctacctggacctctcctccaaccagctgcgtacactggatgagttcctgttcagtgacctgcaagtactggaggtgctgctgctctacaataaccacatcatggcggtggaccggtgcgccttcgatgacatggcccagctgcagaaactctacttgagccagaaccagatctctcgcttccctctggaactggtcaaggaaggagccaagctacccaaactaacgctcctggatctctcttctaacaagctgaagaacttgccattgcctgacctgcagaagctgccggcctggatcaagaatgggctgtacctacataacaaccccctgaactgcgactgtgagctctaccagctgttttcacactggcagtatcggcagctgagctccgtgatggactttcaagaggatctgtactgcatgaactccaagaagctgcacaatgtcttcaacctgagtttcctcaactgtggcgagtacaaggagcgtgcctgggaggcccacctgggtgacaccttgatcatcaagtgtgacaccaagcagcaagggatgaccaaggtgtgggtgacaccaagtaatgaacgggtgctagatgaggtgaccaatggcacagtgagtgtgtctaaggatggcagtcttcttttccagcaggtgcaggtcgaggacggtggtgtgtatacctgctatgccatgggagagactttcaatgagacactgtctgtggaattgaaagtgcacaatttcaccttgcacggacaccatgacaccctcaacacagcctataccaccctagtgggctgtatccttagtgtggtcctggtcctcatatacctatacctcaccccttgccgctgctggtgccggggtgtagagaagccttccagccatcaaggagacagcctcagctcttccatgcttagtaccacacccaaccatgatcctatggctggtggggacaaagatgatggttttgaccggcgggtggctttcctggaacctgctggacctgggcagggtcaaaacggcaagctcaagccaggcaacaccctgccagtgcctgaggccacaggcaagggccaacggaggatgtcggatccagaatcagtcagctcggtcttctctgatacgcccattgtggtgtgagcaggatgggttggtggggagattctgccccaggagaggtaatgcacccctgaaggatatgaggggatggaagagagggctggctgcccaagggaatggattcctcctgacctcaagggaattggtcccaggtacaacagagagcaagaccccaaacagggcgtggctgccacgattttcaaatgggggtatattaatcctcaggcaaatgctacacccgtacccaaagccctgccaattctcagtgtggtagaggaagagaagcatgtctgagttggatgggaatgaggaaggagtgaggggaagaacagattccctaaactttcatgaggtcatccctagctccttaagagaaaaacatttagaaaaaaaaattttttctatctctgcccacccacacctgtgatgttgtgtgtgttgggggagcttccacaggagccacactggggaaaagctgtagtatcttctttgtttagcaagtcaaacttcacagctggggaagttgaaaacctttggaaaatgagtcaggaaaaggctgagacctcaatcggtaacaattccccaaagctgttgtaagactttgcattaaagcctttctttttcctgatgtgccctgggtggatggatctttgcaggagcctggcctgctgccttttagttacaacagcaatgtgggatgtggtatctgtgccttgtcctgggaccaatggcacagagggttatagcatgaactgaagggtccatgtcacagcataggtgccagcacgaaacttgtagatggggggtgaattccagataggctaattccctggttggtgaaacccttggttagtatttgattcccagcatctgtgtgtcaggccagagtgggggctgctgaaggcagagcttttatggatgcctgccacagacgtggtacatgggcccacttcacgatagaaggatgaaggtaaatcagcctctattatgtagcatccagctggacctagctgattctcaatgtatgccatctcttcatccagtctccttatcaagctcaggtgggattctgaattttccctaatatgctgctctgtaaagggaggagtccaagaaagcctggccccagctggcttagagtaggcttggcgatagtgaaaatccagtatatatctcctctgtgtggacaaggttgccttgctcctctcagagataccacctctgctgcaaagtcaaagcatggggttttgacatcagaagggttggaattgggtggtctctaccccagaatggcaatttggagtgcagcttcaagttctgccctctccacagattccaggcaatcctgaagcagagataatcagtagtactaaactttcagaaggggagttctgccaccccattcctccatcgagaggtctttgcagttgtggttgtgaggccagaggaacttaagaagaatgagctcaacattccattccatccaaggttgcagaatactttgagtatggagatgaccgatccctttaacctttccctttgactatactgcatgccctgtgagtggctgctctgagctttggcgggggatgagcagggtgaaggtgaaaatgttctctgatgttggtttttcttagtgtctcttctctcccacgtttctagtccattggaagttctccagatcctctagatttctgacctctttttacattctaagaggtgtcatttacctgtgggtgaggggcttggagggcctgactattaagcttcctattatgattggggaaggggactcaacatcttccccttgtctggtcctgggaactcaagactgctgtccatcctttattagtaacctagttttgttgagagagaggtgcagcatttccctcaagtacctgcatgctcataggtatgcatgcttataggtatgcatgcacaccagcaccttgacttccaccaggacagtgaatctgtagtccccattaatgatactctcagaatggtctccaccaatgtgcacaacttcatgcacacaattgtattcctctttaggagagacagtgaccatgccaggctcttcaaatacacactcctgtattttcatttctgaactccctgaagcttcacccacatctccatggcactgaatcacttttctgcccaggctggagttagaagaaccatgggttgaaggccttgggagaagaggtggtaaggagctacctggttctttggactcctcagaaacctcccgtgaagactatatatatgagcaatatatgagcaattaagatagaactaggtcattgaaggactcagaaggaaactggcaaggggctaagtagctgtgagctgctcttcctgttaactgtcctcaggagagaaaagttgtcttgatttattccagagactcctgagaattttgttactggagctataggaactaggactccctcctcagactcatcaggaaatctgggaaaatctcatctccatgctgcagtctccccgcttggcaccatctagggctctgaagatctttaaagtgagcgttaaatgaagcaggccttctggggcatcgtgatggagctcctgaggactgggagggccgttttcttcataattcctacccagtttagggaatgagaaaaggccctgtggctcttaagtctcctgactatatccactagtttggccttgagtttgagacacctggtagatgtacctggctgccctaccaagagatttgatttgtttcttcccgtggtttcaggtgatagaacccaaaggtagctttttaattggagaattgaataatcagcatatgtaagcgcactagaaccctgtgttgaaaactgccaggtgtgggtataagaaaaggccgagagatcaccacctcctcttaccctaccccacacccataaaccagacatgtctcccaggaagcaggtgtccctggacacagaggatgacagggctctacaatctgtgtaattattattattattattattttgtatttatggggcccaagaaaggggccaggagagggtacaccccagctggggagagcaaagcagatggatccagttttctgtgtgttcttacctctgtacttcctcgtagctctgctgacaaagcaagcaggcctcccgtgtccaagaccccattcctcccacttgtgtacacctaggctggcaaatcttggagcctctgggctctgaaaactagacaatgatcattaaacctggcttgagtctctgttctggc

SEQ ID NO: 119 - protein, 437 aa, Homo sapiens
HSLPSYTALLDLSHNNLSRLRAEWTPTRLTQLHSLLLSHNHLNFISSEAFSPVPNLRYLDLSSNQLRTLDEFLFSDLQVLEVLLLYNNHIMAVDRCAFDDMAQLQKLYLSQNQISRFPLELVKEGAKLPKLTLLDLSSNKLKNLPLPDLQKLPAWIKNGLYLHNNPLNCDCELYQLFSHWQYRQLSSVMDFQEDLYCMNSKKLHNVFNLSFLNCGEYKERAWEAHLGDTLIIKCDTKQQGMTKVWVTPSNERVLDEVTNGTVSVSKDGSLLFQQVQVEDGGVYTCYAMGETFNETLSVELKVHNFTLHGHHDTLNTAYTTLVGCILSVVLVLIYLYLTPCRCWCRGVEKPSSHQGDSLSSSMLSTTPNHDPMAGGDKDDGFDRRVAFLEPAGPGQGQNGKLKPGNTLPVPEATGKGQRRMSDPESVSSVFSDTPIVV

SEQ ID NO: 120 - DNA, 1719 bp, Homo sapiens
gatagaccatgagcagccatggcaacagcctgttccttcgggagagcggccagcggctgggccgggtgggctggctgcagcggctgcaggaaagcctgcagcagagagcactgcgcacgcgcctgcgcctgcagaccatgaccctcgagcacgtgctgcgcttcctgcgccgaaacgccttcattctgctgacggtcagcgccgtggtcattggggtcagcctggcctttgccctgcgcccatatcagctcacctaccgccagatcaagtacttctcttttcctggagagcttctgatgaggatgctgcagatgctggtgttacctctcattgtctccagcctggtcacaggtatggcatccctggacaacaaggccacggggcggatggggatgcgggcagctgtgtactacatggtgaccaccatcatcgcggtcttcatcggcatcctcatggtcaccatcatccatcccgggaagggctccaaggaggggctgcaccgggagggccggatcgagaccatccccacagctgatgccttcatggacctgatcagaaatatgtttccaccaaaccttgtggaggcctgcttcaaacagttcaagacgcagtacagcacgagggtggtaaccaggaccatggtgaggacagagaacgggtctgagccgggtgcctccatgcctcctccattctcagtggagaacggaaccagcttcctggaaaatgtcactcgggccttgggtaccctgcaggagatgctgagctttgaggagactgtacccgtgcctggctccgccaatggcatcaacgccctgggcctcgtggtcttctctgtggcctttgggctggtcattggtggcatgaaacacaagggcagagtcctcagggacttcttcgacagcctcaatgaggctattatgaggctggtgggcatcattatctggtatgcacctgtgggcatcctgttcctgattgctgggaagattctggagatggaagacatggccgtcctggggggtcagctgggcatgtacaccctgaccgtcatcgtgggcctgttcctccatgccggcattgtccttcccctcatctacttcctcgtcactcaccggaaccccttccccttcattgggggcatgctacaagccctcatcaccgctatgggcacgtcttccagctcggcaacgctgcccatcaccttccgctgcctggaggagggcctgggtgtggaccgccgcatcaccaggttcgtcctgcccgtgggcgccacggtcaacatggatggcactgccctctacgaggccctggctgccatcttcattgctcaagttaacaactacgagctcaacctgggtcagatcacaaccatcagcatcacggccacagcagccagtgttggggctgctggcatcccccaggcgggtctggtcaccatggtcattgtgcttacgtcggtcggcttgcccacggaagacatcacgctcatcatcgccgtggactggttccttgaccggcttcgcacaatgaccaacgtactgggggactcaattggagcggccgtcatcgagcacttgtctcagcgggagctggagcttcaggaagctgagcttaccctccccagcctggggaaaccctacaagtccctcatggcacaggagaagggggcatcccggggacggggaggcaacgagagtgctatgtgaggggcctccagctctg

SEQ ID NO: 121 - protein, 564 aa, Homo sapiens
MSSHGNSLFLRESGQRLGRVGWLQRLQESLQQRALRTRLRLQTMTLEHVLRFLRRNAFILLTVSAVVIGVSLAFALRPYQLTYRQIKYFSFPGELLMRMLQMLVLPLIVSSLVTGMASLDNKATGRMGMRAAVYYMVTTIIAVFIGILMVTIIHPGKGSKEGLHREGRIETIPTADAFMDLIRNMFPPNLVEACFKQFKTQYSTRVVTRTMVRTENGSEPGASMPPPFSVENGTSFLENVTRALGTLQEMLSFEETVPVPGSANGINALGLVVFSVAFGLVIGGMKHKGRVLRDFFDSLNEAIMRLVGIIIWYAPVGILFLIAGKILEMEDMAVLGGQLGMYTLTVIVGLFLHAGIVLPLIYFLVTHRNPFPFIGGMLQALITAMGTSSSSATLPITFRCLEEGLGVDRRITRFVLPVGATVNMDGTALYEALAAIFIAQVNNYELNLGQITTISITATAASVGAAGIPQAGLVTMVIVLTSVGLPTEDITLIIAVDWFLDRLRTMTNVLGDSIGAAVIEHLSQRELELQEAELTLPSLGKPYKSLMAQEKGASRGRGGNESAM

SEQ ID NO: 122 - DNA, 1578 bp, Homo sapiens
acgaacaggccaataaggagggagcagtgcggggtttaaatctgaggctaggctggctcttctcggcgtgctgcggcggaacggctgttggtttctgctggttgtaggtccttggctggtcgggcctccggtgttctgcttctccccgctgagctgctgcctggtgaagaggaagccatggcgctccgagtcaccaggaactcgaaaattaatgctgaaaataaggcgaagatcaacatggcaggcgcaaagcgcgttcctacggcccctgctgcaacctccaagcccggactgaggccaagaacagctcttggggacattggtaacaaagtcagtgaacaactgcaggccaaaatgcctatgaagaaggaagcaaaaccttcagctactggaaaagtcattgataaaaaactaccaaaacctcttgaaaaggtacctatgctggtgccagtgccagtgtctgagccagtgccagagccagaacctgagccagaacctgagcctgttaaagaagaaaaactttcgcctgagcctattttggttgatactgcctctccaagcccaatggaaacatctggatgtgcccctgcagaagaagacctgtgtcaggctttctctgatgtaattcttgcagtaaatgatgtggatgcagaagatggagctgatccaaacctttgtagtgaatatgtgaaagatatttatgcttatctgagacaacttgaggaagagcaagcagtcagaccaaaatacctactgggtcgggaagtcactggaaacatgagagccatcctaattgactggctagtacaggttcaaatgaaattcaggttgttgcaggagaccatgtacatgactgtctccattattgatcggttcatgcagaataattgtgtgcccaagaagatgctgcagctggttggtgtcactgccatgtttattgcaagcaaatatgaagaaatgtaccctccagaaattggtgactttgcttttgtgactgacaacacttatactaagcaccaaatcagacagatggaaatgaagattctaagagctttaaactttggtctgggtcggcctctacctttgcacttccttcggagagcatctaagattggagaggttgatgtcgagcaacatactttggccaaatacctgatggaactaactatgttggactatgacatggtgcactttcctccttctcaaattgcagcaggagctttttgcttagcactgaaaattctggataatggtgaatggacaccaactctacaacattacctgtcatatactgaagaatctcttcttccagttatgcagcacctggctaagaatgtagtcatggtaaatcaaggacttacaaagcacatgactgtcaagaacaagtatgccacatcgaagcatgctaagatcagcactctaccacagctgaattctgcactagttcaagatttagccaaggctgtggcaaaggtgtaacttgtaaacttgagttggagtactatatttacaaataaaattggcaccatgtgccatctgtaaaaaaaaaaaaaaaaaaaaaaaaaaaaaaaaaaaaaa

SEQ ID NO: 123 - protein, 433 aa, Homo sapiens
MALRVTRNSKINAENKAKINMAGAKRVPTAPAATSKPGLRPRTALGDIGNKVSEQLQAKMPMKKEAKPSATGKVIDKKLPKPLEKVPMLVPVPVSEPVPEPEPEPEPEPVKEEKLSPEPILVDTASPSPMETSGCAPAEEDLCQAFSDVILAVNDVDAEDGADPNLCSEYVKDIYAYLRQLEEEQAVRPKYLLGREVTGNMRAILIDWLVQVQMKFRLLQETMYMTVSIIDRFMQNNCVPKKMLQLVGVTAMFIASKYEEMYPPEIGDFAFVTDNTYTKHQIRQMEMKILRALNFGLGRPLPLHFLRRASKIGEVDVEQHTLAKYLMELTMLDYDMVHFPPSQIAAGAFCLALKILDNGEWTPTLQHYLSYTEESLLPVMQHLAKNVVMVNQGLTKHMTVKNKYATSKHAKISTLPQLNSALVQDLAKAVAKV

SEQ ID NO: 124 - DNA, 1778 bp, Homo sapiens
tagaagtttacaatgaagtttcttctaatactgctcctgcaggccactgcttctggagctcttcccctgaacagctctacaagcctggaaaaaaataatgtgctatttggtgaaagatacttagaaaaattttatggccttgagataaacaaacttccagtgacaaaaatgaaatatagtggaaacttaatgaaggaaaaaatccaagaaatgcagcacttcttgggtctgaaagtgaccgggcaactggacacatctaccctggagatgatgcacgcacctcgatgtggagtccccgatgtccatcatttcagggaaatgccaggggggcccgtatggaggaaacattatatcacctacagaatcaataattacacacctgacatgaaccgtgaggatgttgactacgcaatccggaaagctttccaagtatggagtaatgttacccccttgaaattcagcaagattaacacaggcatggctgacattttggtggtttttgcccgtggagctcatggagacttccatgcttttgatggcaaaggtggaatcctagcccatgcttttggacctggatctggcattggaggggatgcacatttcgatgaggacgaattctggactacacattcaggaggcacaaacttgttcctcactgctgttcacgagattggccattccttaggtcttggccattctagtgatccaaaggccgtaatgttccccacctacaaatatgttgacatcaacacatttcgcctctctgctgatgacatacgtggcattcagtccctgtatggagacccaaaagagaaccaacgcttgccaaatcctgacaattcagaaccagctctctgtgaccccaatttgagttttgatgctgtcactaccgtgggaaataagatctttttcttcaaagacaggttcttctggctgaaggtttctgagagaccaaagaccagtgttaatttaatttcttccttatggccaaccttgccatctggcattgaagctgcttatgaaattgaagccagaaatcaagtttttctttttaaagatgacaaatactggttaattagcaatttaagaccagagccaaattatcccaagagcatacattcttttggttttcctaactttgtgaaaaaaattgatgcagctgtttttaacccacgtttttataggacctacttctttgtagataaccagtattggaggtatgatgaaaggagacagatgatggaccctggttatcccaaactgattaccaagaacttccaaggaatcgggcctaaaattgatgcagtcttctactctaaaaacaaatactactatttcttccaaggatctaaccaatttgaatatgacttcctactccaacgtatcaccaaaacactgaaaagcaatagctggtttggttgttgaaaatggtgtaattaatggtttttgttagttcacttcagcttaataagtatttattgcatatttgctatgtcctcagtgtaccactacttagagatatgtatcataaaaataaaatctgtaaaccataggtaatgattatataaaatacataatatttttcaattttgaaaactctaattgtccattcttgcttgactctactattaagtttgaaaatagttaccttcaaagcaagataattctatttgaagcatgctctgtaagttgcttcctaacatccttggactgagaaattatacttacttctggcataactaaaattaagtatatatattttggctcaaataaaattg

SEQ ID NO: 125 - protein, 470 aa, Homo sapiens
MKFLLILLLQATASGALPLNSSTSLEKNNVLFGERYLEKFYGLEINKLPVTKMKYSGNLMKEKIQEMQHFLGLKVTGQLDTSTLEMMHAPRCGVPDVHHFREMPGGPVWRKHYITYRINNYTPDMNREDVDYAIRKAFQVWSNVTPLKFSKINTGMADILVVFARGAHGDFHAFDGKGGILAHAFGPGSGIGGDAHFDEDEFWTTHSGGTNLFLTAVHEIGHSLGLGHSSDPKAVMFPTYKYVDINTFRLSADDIRGIQSLYGDPKENQRLPNPDNSEPALCDPNLSFDAVTTVGNKIFFFKDRFFWLKVSERPKTSVNLISSLWPTLPSGIEAAYEIEARNQVFLFKDDKYWLISNLRPEPNYPKSIHSFGFPNFVKKIDAAVFNPRFYRTYFFVDNQYWRYDERRQMMDPGYPKLITKNFQGIGPKIDAVFYSKNKYYYFFQGSNQFEYDFLLQRITKTLKSNSWFGC

SEQ ID NO: 126 - DNA, 1218 bp, Homo sapiens
cccaacctggggcgacttcaggtgtgccacattcgctaagtgctcggagttaatagcacctcctccgagcactcgctcacggcgtccccttgcctggaaagataccgcggtccctccagaggatttgagggacagggtcggagggggctcttccgccagcaccggaggaagaaagaggaggggctggctggtcaccagagggtggggcggaccgcgtgcgctcggcggctgcggagagggggagagcaggcagcgggcggcggggagcagcatggagccggcggcggggagcagcatggagccttcggctgactggctggccacggccgcggcccggggtcgggtagaggaggtgcgggcgctgctggaggcgggggcgctgcccaacgcaccgaatagttacggtcggaggccgatccaggtcatgatgatgggcagcgcccgagtggcggagctgctgctgctccacggcgcggagcccaactgcgccgaccccgccactctcacccgacccgtgcacgacgctgcccgggagggcttcctggacacgctggtggtgctgcaccgggccggggcgcggctggacgtgcgcgatgcctggggccgtctgcccgtggacctggctgaggagctgggccatcgcgatgtcgcacggtacctgcgcgcggctgcggggggcaccagaggcagtaaccatgcccgcatagatgccgcggaaggtccctcagacatccccgattgaaagaaccagagaggctctgagaaacctcgggaaacttagatcatcagtcaccgaaggtcctacagggccacaactgcccccgccacaacccaccccgctttcgtagttttcatttagaaaatagagcttttaaaaatgtcctgccttttaacgtagatatatgccttcccccactaccgtaaatgtccatttatatcattttttatatattcttataaaaatgtaaaaaagaaaaacaccgcttctgccttttcactgtgttggagttttctggagtgagcactcacgccctaagcgcacattcatgtgggcatttcttgcgagcctcgcagcctccggaagctgtcgacttcatgacaagcattttgtgaactagggaagctcaggggggttactggcttctcttgagtcacactgctagcaaatggcagaaccaaagctcaaataaaaataaaataattttcattcattcactc

SEQ ID NO: 127 - protein, 156 aa, Homo sapiens
MEPAAGSSMEPSADWLATAAARGRVEEVRALLEAGALPNAPNSYGRRPIQVMMMGSARVAELLLLHGAEPNCADPATLTRPVHDAAREGFLDTLVVLHRAGARLDVRDAWGRLPVDLAEELGHRDVARYLRAAAGGTRGSNHARIDAAEGPSDIPD

SEQ ID NO: 128 - DNA, 897 bp, Homo sapiens
tgtgtgggggtctgcttggcggtgagggggctctacacaagcttcctttccgtcatgccggcccccaccctggctctgaccattctgttctctctggcaggtcatgatgatgggcagcgcccgagtggcggagctgctgctgctccacggcgcggagcccaactgcgccgaccccgccactctcacccgacccgtgcacgacgctgcccgggagggcttcctggacacgctggtggtgctgcaccgggccggggcgcggctggacgtgcgcgatgcctggggccgtctgcccgtggacctggctgaggagctgggccatcgcgatgtcgcacggtacctgcgcgcggctgcggggggcaccagaggcagtaaccatgcccgcatagatgccgcggaaggtccctcagacatccccgattgaaagaaccagagaggctctgagaaacctcgggaaacttagatcatcagtcaccgaaggtcctacagggccacaactgcccccgccacaacccaccccgctttcgtagttttcatttagaaaatagagcttttaaaaatgtcctgccttttaacgtagatataagccttcccccactaccgtaaatgtccatttatatcattttttatatattcttataaaaatgtaaaaaagaaaaacaccgcttctgccttttcactgtgttggagttttctggagtgagcactcacgccctaagcgcacattcatgtgggcatttcttgcgagcctcgcagcctccggaagctgtcgacttcatgacaagcattttgtgaactagggaagctcaggggggttactggcttctcttgagtcacactgctagcaaatggcagaaccaaagctcaaataaaaataaaataattttcattcattcactc

SEQ ID NO: 129 - protein, 105 aa, Homo sapiens
MMMGSARVAELLLLHGAEPNCADPATLTRPVHDAAREGFLDTLVVLHRAGARLDVRDAWGRLPVDLAEELGHRDVARYLRAAAGGTRGSNHARIDAAEGPSDIPD

SEQ ID NO: 130 - DNA, 1515 bp, Homo sapiens
cccaacctggggcgacttcaggtgtgccacattcgctaagtgctcggagttaatagcacctcctccgagcactcgctcacggcgtccccttgcctggaaagataccgcggtccctccagaggatttgagggacagggtcggagggggctcttccgccagcaccggaggaagaaagaggaggggctggctggtcaccagagggtggggcggaccgcgtgcgctcggcggctgcggagagggggagagcaggcagcgggcggcggggagcagcatggagccggcggcggggagcagcatggagccggcggcggggagcagcatggagccttcggctgactggctggccacggccgcggcccggggtcgggtagaggaggtgcgggcgctgctggaggcgggggcgctgcccaacgcaccgaatagttacggtcggaggccgatccaggtgggtagaaggtctgcagcgggagcaggggatggcgggcgactctggaggacgaagtttgcaggggaattggaatcaggtagcgcttcgattctccggaaaaaggggaggcttcctggggagttttcagaaggggtttgtaatcacagacctcctcctggcgacgccctgggggcttgggaaaccaaggaagaggaatgaggagccacgcgcgtacagatctctcgaatgctgagaagatctgaaggggggaacatatttgtattagatggaagtcatgatgatgggcagcgcccgagtggcggagctgctgctgctccacggcgcggagcccaactgcgccgaccccgccactctcacccgacccgtgcacgacgctgcccgggagggcttcctggacacgctggtggtgctgcaccgggccggggcgcggctggacgtgcgcgatgcctggggccgtctgcccgtggacctggctgaggagctgggccatcgcgatgtcgcacggtacctgcgcgcggctgcggggggcaccagaggcagtaaccatgcccgcatagatgccgcggaaggtccctcagacatccccgattgaaagaaccagagaggctctgagaaacctcgggaacttagatcatcagtcaccgaaggtcctacagggccacaactgcccccgccacaacccaccccgctttcgtagttttcatttagaaaatagagcttttaaaaatgtcctgccttttaacgtagatatatgccttcccccactaccgtaaatgtccatttatatcattttttatatattcttataaaaatgtaaaaaagaaaaacaccgcttctgccttttcactgtgttggagttttctggagtgagcactcacgccctaagcgcacattcatgtgggcatttcttgcgagcctcgcagcctccggaagctgtcgacttcatgacaagcattttgtgaactagggaagctcaggggggttactggcttctcttgagtcacactgctagcaaatggcagaaccaaagctcaaataaaaataaaataattttcattcattcactc

SEQ ID NO: 131 - protein, 124 aa, Homo sapiens
MEPAAGSSMEPAAGSSMEPSADWLATAAARGRVEEVRALLEAGALPNAPNSYGRRPIQVGRRSAAGAGDGGRLWRTKFAGELESGSASILRKKGRLPGEFSEGVCNHRPPPGDALGAWETKEEE

SEQ ID NO: 132 - DNA, 1275 bp, Homo sapiens
cctccctacgggcgcctccggcagcccttcccgcgtgcgcagggctcagagccgttccgagatcttggaggtccgggtgggagtgggggtggggtgggggtgggggtgaaggtggggggcgggcgcgctcagggaaggcgggtgcgcgcctgcggggcggagatgggcagggggcggtgcgtgggtcccagtctgcagttaagggggcaggagtggcgctgctcacctctggtgccaaagggcggcgcagcggctgccgagctcggccctggaggcggcgagaacatggtgcgcaggttcttggtgaccctccggattcggcgcgcgtgcggcccgccgcgagtgagggttttcgtggttcacatcccgcggctcacgggggagtgggcagcgccaggggcgcccgccgctgtggccctcgtgctgatgctactgaggagccagcgtctagggcagcagccgcttcctagaagaccaggtcatgatgatgggcagcgcccgagtggcggagctgctgctgctccacggcgcggagcccaactgcgccgaccccgccactctcacccgacccgtgcacgacgctgcccgggagggcttcctggacacgctggtggtgctgcaccgggccggggcgcggctggacgtgcgcgatgcctggggccgtctgcccgtggacctggctgaggagctgggccatcgcgatgtcgcacggtacctgcgcgcggctgcggggggcaccagaggcagtaaccatgcccgcatagatgccgcggaaggtccctcagacatccccgattgaaagaaccagagaggctctgagaaacctcgggaaacttagatcatcagtcaccgaaggtcctacagggccacaactgcccccgccacaacccaccccgctttcgtagttttcatttagaaaatagagcttttaaaaatgtcctgccttttaacgtagatatatgccttcccccactaccgtaaatgtccatttatatcattttttatatattcttataaaaatgtaaaaaagaaaaacaccgcttctgccttttcactgtgttggagttttctggagtgagcactcacgccctaagcgcacattcatgtgggcatttcttgcgagcctcgcagcctccggaagctgtcgacttcatgacaagcattttgtgaactagggaagctcaggggggttactggcttctcttgagtcacactgctagcaaatggcagaaccaaagctcaaataaaaataaaataattttcattcattcactc

SEQ ID NO: 133 - protein, 173 aa, Homo sapiens
MGRGRCVGPSLQLRGQEWRCSPLVPKGGAAAAELGPGGGENMVRRFLVTLRIRRACGPPRVRVFVVHIPRLTGEWAAPGAPAAVALVLMLLRSQRLGQQPLPRRPGHDDGQRPSGGAAAAPRRGAQLRRPRHSHPTRARRCPGGLPGHAGGAAPGRGAAGRARCLGPSARGPG

SEQ ID NO: 134 - DNA, 1077 bp, Homo sapiens
atggggttcaacttgacgcttgcaaaattaccaaataacgagctgcacggccaagagagtcacaattcaggcaacaggagcgacgggccaggaaagaacaccacccttcacaatgaatttgacacaattgtcttgccggtgctttatctcattatatttgtggcaagcatcttgctgaatggtttagcagtgtggatcttcttccacattaggaataaaaccagcttcatattctatctcaaaaacatagtggttgcagacctcataatgacgctgacatttccatttcgaatagtccatgatgcaggatttggaccttggtacttcaagtttattctctgcagatacacttcagttttgttttatgcaaacatgtatacttccatcgtgttccttgggctgataagcattgatcgctatctgaaggtggtcaagccatttggggactctcggatgtacagcataaccttcacgaaggttttatctgtttgtgtttgggtgatcatggctgttttgtctttgccaaacatcatcctaacaaatggtcagccaacagaggacaatatccatgactgctcaaaacttaaaagtcctttgggggtcaaatggcatacggcagtcacctatgtgaacagctgcttgtttgtggccgtgctggtgattctgatcggatgttacatagccatatccaggtacatccacaaatccagcaggcaattcataagtcagtcaagccgaaagcgaaaacataaccagagcatcagggttgttgtggctgtgttttttacctgctttctaccatatcacttgtgcagaattccttttacttttagtcacttagacaggcttttagatgaatctgcacaaaaaatcctatattactgcaaagaaattacacttttcttgtctgcgtgtaatgtttgcctggatccaataatttactttttcatgtgtaggtcattttcaagaaggctgttcaaaaaatcaaatatcagaaccaggagtgaaagcatcagatcactgcaaagtgtgagaagatcggaagttcgcatatattatgattacactgatgtgtaa

SEQ ID NO: 135 - protein, 358 aa, Homo sapiens
MGFNLTLAKLPNNELHGQESHNSGNRSDGPGKNTTLHNEFDTIVLPVLYLIIFVASILLNGLAVWIFFHIRNKTSFIFYLKNIVVADLIMTLTFPFRIVHDAGFGPWYFKFILCRYTSVLFYANMYTSIVFLGLISIDRYLKVVKPFGDSRMYSITFTKVLSVCVWVIMAVLSLPNIILTNGQPTEDNIHDCSKLKSPLGVKWHTAVTYVNSCLFVAVLVILIGCYIAISRYIHKSSRQFISQSSRKRKHNQSIRVVVAVFFTCFLPYHLCRIPFTFSHLDRLLDESAQKILYYCKEITLFLSACNVCLDPIIYFFMCRSFSRRLFKKSNIRTRSESIRSLQSVRRSEVRIYYDYTDV

SEQ ID NO: 136 - DNA, 1662 bp, Homo sapiens
atgccggtgcagctgacgacagccctgcgtgtggtgggcaccagcctgtttgccctggcagtgctgggtggcatcctggcagcctatgtgacgggctaccagttcatccacacggaaaagcactacctgtccttcggcctgtacggcgccatcctgggcctgcacctgctcattcagagcctttttgccttcctggagcaccggcgcatgcgacgtgccggccaggccctgaagctgccctccccgcggcggggctcggtggcactgtgcattgccgcgtaccaggaggaccctgactacttgcgcaagtgcctgcgctcggcccagcgcatctccttccctgacctcaaggtggtcatggtggtggatggcaaccgccaggaggacgcctacatgctggacatcttccacgaggtgctgggcggcaccgagcaggccggcttctttgtgtggcgcagcaacttccatgaggcaggcgagggtgagacggaggccagcctgcaggagggcatggaccgtgtgcgggatgtggtgcgggccagcaccttctcgtgcatcatgcagaagtggggaggcaagcgcgaggtcatgtacacggccttcaaggccctcggcgattcggtggactacatccaggtgtgcgactctgacactgtgctggatccagcctgcaccatcgagatgcttcgagtcctggaggaggatccccaagtagggggagtcgggggagatgtccagatcctcaacaagtacgactcatggatttccttcctgagcagcgtgcggtactggatggccttcaacgtggagcgggcctgccagtcctactttggctgtgtgcagtgtattagtgggcccttgggcatgtaccgcaacagcctcctccagcagttcctggaggactggtaccatcagaagttcctaggcagcaagtgcagcttcggggatgaccggcacctcaccaaccgagtcctgagccttggctaccgaactaagtataccgcgcgctccaagtgcctcacagagacccccactaagtacctccggtggctcaaccagcaaacccgctggagcaagtcttacttccgggagtggctctacaactctctgtggttccataagcaccacctctggatgacctacgagtcagtggtcacgggtttcttccccttcttcctcattgccacggttatacagcttttctaccggggccgcatctggaacattctcctcttcctgctgacggtgcagctggtgggcattatcaaggccacctacgcctgcttccttcggggcaatgcagagatgatcttcatgtccctctactccctcctctatatgtccagccttctgccggccaagatctttgccattgctaccatcaacaaatctggctggggcacctctggccgaaaaaccattgtggtgaacttcattggcctcattcctgtgtccatctgggtggcagttctcctgggagggctggcctacacagcttattgccaggacctgttcagtgagacagagctagccttccttgtctctggggctatactgtatggctgctactgggtggccctcctcatgctatatctggccatcatcgcccggcgatgtgggaagaagccggagcagtacagcttggcttttgctgaggtgtga

SEQ ID NO: 137 - protein, 553 aa, Homo sapiens
MPVQLTTALRVVGTSLFALAVLGGILAAYVTGYQFIHTEKHYLSFGLYGAILGLHLLIQSLFAFLEHRRMRRAGQALKLPSPRRGSVALCIAAYQEDPDYLRKCLRSAQRISFPDLKVVMVVDGNRQEDAYMLDIFHEVLGGTEQAGFFVWRSNFHEAGEGETEASLQEGMDRVRDVVRASTFSCIMQKWGGKREVMYTAFKALGDSVDYIQVCDSDTVLDPACTIEMLRVLEEDPQVGGVGGDVQILNKYDSWISFLSSVRYWMAFNVERACQSYFGCVQCISGPLGMYRNSLLQQFLEDWYHQKFLGSKCSFGDDRHLTNRVLSLGYRTKYTARSKCLTETPTKYLRWLNQQTRWSKSYFREWLYNSLWFHKHHLWMTYESVVTGFFPFFLIATVIQLFYRGRIWNILLFLLTVQLVGIIKATYACFLRGNAEMIFMSLYSLLYMSSLLPAKIFAIATINKSGWGTSGRKTIVVNFIGLIPVSIWVAVLLGGLAYTAYCQDLFSETELAFLVSGAILYGCYWVALLMLYLAIIARRCGKKPEQYSLAFAEV

SEQ ID NO: 138 - DNA, 780 bp, Homo sapiens
agcagggggcgctgtgtgtaccgagaatacgagaatacctcgtgggccctgaccttctctctgagagccgggcagaggctccggagccatgcaggccgaaggccggggcacagggggttcgacgggcgatgctgatggcccaggaggccctggcattcctgatggcccagggggcaatgctggcggcccaggagaggcgggtgccacgggcggcagaggtccccggggcgcaggggcagcaagggcctcggggccgggaggaggcgccccgcggggtccgcatggcggcgcggcttcagggctgaatggatgctgcagatgcggggccagggggccggagagccgcctgcttgagttctacctcgccatgcctttcgcgacacccatggaagcagagctggcccgcaggagcctggcccaggatgccccaccgcttcccgtgccaggggtgcttctgaaggagttcactgtgtccggcaacatactgactatccgactgactgctgcagaccaccgccaactgcagctctccatcagctcctgtctccagcagctttccctgttgatgtggatcacgcagtgctttctgcccgtgtttttggctcagcctccctcagggcagaggcgctaagcccagcctggcgccccttcctaggtcatgcctcctcccctagggaatggtcccagcacgagtggccagttcattgtgggggcctgattgtttgtcgctggaggaggacggcttacatgtttgtttctgtagaaaataaaactgagcta

SEQ ID NO: 139 - protein, 180 aa, Homo sapiens
MQAEGRGTGGSTGDADGPGGPGIPDGPGGNAGGPGEAGATGGRGPRGAGAARASGPGGGAPRGPHGGAASGLNGCCRCGARGPESRLLEFYLAMPFATPMEAELARRSLAQDAPPLPVPGVLLKEFTVSGNILTIRLTAADHRQLQLSISSCLQQLSLLMWITQCFLPVFLAQPPSGQRR

SEQ ID NO: 140 - DNA, 608 bp, Homo sapiens
cctcgtgggccctgaccttctctctgagagccgggcagaggctccggagccatgcaggccgaaggccagggcacagggggttcgacgggcgatgctgatggcccaggaggccctggcattcctgatggcccagggggcaatgctggcggcccaggagaggcgggtgccacgggcggcagaggtccccggggcgcaggggcagcaagggcctcggggccgagaggaggcgccccgcggggtccgcatggcggtgccgcttctgcgcaggatggaaggtgcccctgcggggccaggaggccggacagccgcctgcttcagttccgactgactgctgcagaccaccgccaactgcagctctccatcagctcctgtctccagcagctttccctgttgatgtggatcacgcagtgctttctgcccgtgtttttggctcaggctccctcagggcagaggcgctaagcccagcctggcgccccttcctaggtcatgcctcctcccctagggaatggtcccagcacgagtggccagttcattgtgggggcctgattgtttgtcgctggaggaggacggcttacatgtttgtttctgtagaaaataaagctgagcta

SEQ ID NO: 141 - protein, 135 aa, Homo sapiens
MQAEGQGTGGSTGDADGPGGPGIPDGPGGNAGGPGEAGATGGRGPRGAGAARASGPRGGAPRGPHGGAASAQDGRCPCGARRPDSRLLQFRLTAADHRQLQLSISSCLQQLSLLMWITQCFLPVFLAQAPSGQRR

SEQ ID NO: 142 - DNA, 735 bp, Homo sapiens
aggcagagctctgcaaggagaggttgtgtcttcgttctttccgccatcttcgttctttccaacatcttcgttctttctcactgaccgagactcagccggtaggtctgcagagtggtcttcctggtaatttagttgtgagtgaatgtgtggaggagccagcgggcttaggacaggtcctgtggcacagtccgtggctttgagggaaaagggcctcgcggtggtcctccgccttcccccaggtcgtgatgcaggcgccatgggccggtaatcgtggctgggctggaacgagggaggaagtgagagatatgagtgagcatgtaacaagatcccaatcctcagaaagaggaaatgaccaagagtcttcccagccagttggacctgtgattgtccagcagcccactgaggaaaaacgtcaagaagaggaaccaccaactgataatcagggtattgcacctagtggggagatcaaaaatgaaggagcacctgctgttcaagggactgatgtggaagcttttcaacaggaactggctctgcttaagatagaggatgcacctggagatggtcctgatgtcagggaggggactctgcccacttttgatcccactaaagtgctggaagcaggtgaagggcaactataggtttaaaccaagacaaatgaagactgaaaccaagaatattgttcttatgctggaaatttgactgctaacattctcttaataaagttttacagttttc

SEQ ID NO: 143 - protein, 110 aa, Homo sapiens
MSEHVTRSQSSERGNDQESSQPVGPVIVQQPTEEKRQEEEPPTDNQGIAPSGEIKNEGAPAVQGTDVEAFQQELALLKIEDAPGDGPDVREGTLPTFDPTKVLEAGEGQL

SEQ ID NO: 144 - DNA, 527 bp, Homo sapiens
gccagggagctgtgaggcagtgctgtgtggttcctgccgtccggactctttttcctctactgagattcatctgtgtgaaatatgagttggcgaggaagatcgacctattattggcctagaccaaggcgctatgtacagcctcctgaagtgattgggcctatgcggcccgagcagttcagtgatgaagtggaaccagcaacacctgaagaaggggaaccagcaactcaacgtcaggatcctgcagctgctcaggagggagaggatgagggagcatctgcaggtcaagggccgaagcctgaagctgatagccaggaacagggtcacccacagactgggtgtgagtgtgaagatggtcctgatgggcaggaggtggacccgccaaatccagaggaggtgaaaacgcctgaagaaggtgaaaagcaatcacagtgttaaaagaagacacgttgaaatgatgcaggctgctcctatgttggaaatttgttcattaaaattctcccaataaagctttacagccttctgcaaaa

SEQ ID NO: 145 - protein, 117 aa, Homo sapiens
MSWRGRSTYYWPRPRRYVQPPEVIGPMRPEQFSDEVEPATPEEGEPATQRQDPAAAQEGEDEGASAGQGPKPEADSQEQGHPQTGCECEDGPDGQEVDPPNPEEVKTPEEGEKQSQC

SEQ ID NO: 146 - DNA, 5175 bp, Homo sapiens
acagcggagcgcagagtgagaaccaccaaccgaggcgccgggcagcgacccctgcagcggagacagagactgagcggcccggcaccgccatgcctgcgctctggctgggctgctgcctctgcttctcgctcctcctgcccgcagcccgggccacctccaggagggaagtctgtgattgcaatgggaagtccaggcagtgtatctttgatcgggaacttcacagacaaactggtaatggattccgctgcctcaactgcaatgacaacactgatggcattcactgcgagaagtgcaagaatggcttttaccggcacagagaaagggaccgctgtttgccctgcaattgtaactccaaaggttctcttagtgctcgatgtgacaactctggacggtgcagctgtaaaccaggtgtgacaggagccagatgcgaccgatgtctgccaggcttccacatgctcacggatgcggggtgcacccaagaccagagactgctagactccaagtgtgactgtgacccagctggcatcgcagggccctgtgacgcgggccgctgtgtctgcaagccagctgttactggagaacgctgtgataggtgtcgatcaggttactataatctggatggggggaaccctgagggctgtacccagtgtttctgctatgggcattcagccagctgccgcagctctgcagaatacagtgtccataagatcacctctacctttcatcaagatgttgatggctggaaggctgtccaacgaaatgggtctcctgcaaagctccaatggtcacagcgccatcaagatgtgtttagctcagcccaacgactagaccctgtctattttgtggctcctgccaaatttcttgggaatcaacaggtgagctatgggcaaagcctgtcctttgactaccgtgtggacagaggaggcagacacccatctgcccatgatgtgattctggaaggtgctggtctacggatcacagctcccttgatgccacttggcaagacactgccttgtgggctcaccaagacttacacattcaggttaaatgagcatccaagcaataattggagcccccagctgagttactttgagtatcgaaggttactgcggaatctcacagccctccgcatccgagctacatatggagaatacagtactgggtacattgacaatgtgaccctgatttcagcccgccctgtctctggagccccagcaccctgggttgaacagtgtatatgtcctgttgggtacaaggggcaattctgccaggattgtgcttctggctacaagagagattcagcgagactggggccttttggcacctgtattccttgtaactgtcaagggggaggggcctgtgatccagacacaggagattgttattcaggggatgagaatcctgacattgagtgtgctgactgcccaattggtttctacaacgatccgcacgacccccgcagctgcaagccatgtccctgtcataacgggttcagctgctcagtgatgccggagacggaggaggtggtgtgcaataactgccctcccggggtcaccggtgcccgctgtgagctctgtgctgatggctactttggggacccctttggtgaacatggcccagtgaggccttgtcagccctgtcaatgcaacaacaatgtggaccccagtgcctctgggaattgtgaccggctgacaggcaggtgtttgaagtgtatccacaacacagccggcatctactgcgaccagtgcaaagcaggctacttcggggacccattggctcccaacccagcagacaagtgtcgagcttgcaactgtaaccccatgggctcagagcctgtaggatgtcgaagtgatggcacctgtgtttgcaagccaggatttggtggccccaactgtgagcatggagcattcagctgtccagcttgctataatcaagtgaagattcagatggatcagtttatgcagcagcttcagagaatggaggccctgatttcaaaggctcagggtggtgatggagtagtacctgatacagagctggaaggcaggatgcagcaggctgagcaggcccttcaggacattctgagagatgcccagatttcagaaggtgctagcagatcccttggtctccagttggccaaggtgaggagccaagagaacagctaccagagccgcctggatgacctcaagatgactgtggaaagagttcgggctctgggaagtcagtaccagaaccgagttcgggatactcacaggctcatcactcagatgcagctgagcctggcagaaagtgaagcttccttgggaaacactaacattcctgcctcagaccactacgtggggccaaatggctttaaaagtctggctcaggaggccacaagattagcagaaagccacgttgagtcagccagtaacatggagcaactgacaagggaaactgaggactattccaaacaagccctctcactggtgcgcaaggccctgcatgaaggagtcggaagcggaagcggtagcccggacggtgctgtggtgcaagggcttgtggaaaaattggagaaaaccaagtccctggcccagcagttgacaagggaggccactcaagcggaaattgaagcagataggtcttatcagcacagtctccgcctcctggattcagtgtctcggcttcagggagtcagtgatcagtcctttcaggtggaagaagcaaagaggatcaaacaaaaagcggattcactctcaacgctggtaaccaggcatatggatgagttcaagcgtacacaaaagaatctgggaaactggaaagaagaagcacagcagctcttacagaatggaaaaagtgggagagagaaatcagatcagctgctttcccgtgccaatcttgctaaaagcagagcacaagaagcactgagtatgggcaatgccactttttatgaagttgagagcatccttaaaaacctcagagagtttgacctgcaggtggacaacagaaaagcagaagctgaagaagccatgaagagactctcctacatcagccagaaggtttcagatgccagtgacaagacccagcaagcagaaagagccctggggagcgctgctgctgatgcacagagggcaaagaatggggccggggaggccctggaaatctccagtgagattgaacaggagattgggagtctgaacttggaagccaatgtgacagcagatggagccttggccatggaaaagggactggcctctctgaagagtgagatgagggaagtggaaggagagctggaaaggaaggagctggagtttgacacgaatatggatgcagtacagatggtgattacagaagcccagaaggttgataccagagccaagaacgctggggttacaatccaagacacactcaacacattagacggcctcctgcatctgatggaccagcctctcagtgtagatgaagaggggctggtcttactggagcagaagctttcccgagccaagacccagatcaacagccaactgcggcccatgatgtcagagctggaagagagggcacgtcagcagaggggccacctccatttgctggagacaagcatagatgggattctggctgatgtgaagaacttggagaacattagggacaacctgcccccaggctgctacaatacccaggctcttgagcaacagtgaagctgccataaatatttctcaactgaggttcttgggatacagatctcagggctcgggagccatgtcatgtgagtgggtgggatggggacatttgaacatgtttaatgggtatgctcaggtcaactgacctgaccccattcctgatcccatggccaggtggttgtcttattgcaccatactccttgcttcctgatgctgggcaatgaggcagatagcactgggtgtgagaatgatcaaggatctggaccccaaagaatagactggatggaaagacaaactgcacaggcagatgtttgcctcataatagtcgtaagtggagtcctggaatttggacaagtgctgttgggatatagtcaacttattctttgagtaatgtgactaaaggaaaaaactttgactttgcccaggcatgaaattcttcctaatgtcagaacagagtgcaacccagtcacactgtggccagtaaaatactattgcctcatattgtcctctgcaagcttcttgctgatcagagttcctcctacttacaacccagggtgtgaacatgttctccattttcaagctggaagaagtgagcagtgttggagtgaggacctgtaaggcaggcccattcagagctatggtgcttgctggtgcctgccaccttcaagttctggacctgggcatgacatcctttcttttaatgatgccatggcaacttagagattgcatttttattaaagcatttcctaccagcaaagcaaatgttgggaaagtatttactttttcggtttcaaagtgatagaaaagtgtggcttgggcattgaaagaggtaaaattctctagatttattagtcctaattcaatcctacttttcgaacaccaaaaatgatgcgcatcaatgtattttatcttattttctcaatctcctctctctttcctccacccataataagagaatgttcctactcacacttcagctgggtcacatccatccctccattcatccttccatccatctttccatccattacctccatccatccttccaacatatatttattgagtacctactgtgtgccaggggctggtgggacagtggtgacatagtctctgccctcatagagttgattgtctagtgaggaagacaagcatttttaaaaaataaatttaaacttacaaactttgtttgtcacaagtggtgtttattgcaataaccgcttggtttgcaacctctttgctcaacagaacatatgttgcaagaccctcccatgggggcacttgagttttggcaaggctgacagagctctgggttgtgcacatttctttgcattccagctgtcactctgtgcctttctacaactgattgcaacagactgttgagttatgataacaccagtgggaattgctggaggaaccagaggcacttccaccttggctgggaagactatggtgctgccttgcttctgtatttccttggattttcctgaaagtgtttttaaataaagaacaattgttagatgcc

SEQ ID NO: 147 - protein, 1193 aa, Homo sapiens
MPALWLGCCLCFSLLLPAARATSRREVCDCNGKSRQCIFDRELHRQTGNGFRCLNCNDNTDGIHCEKCKNGFYRHRERDRCLPCNCNSKGSLSARCDNSGRCSCKPGVTGARCDRCLPGFHMLTDAGCTQDQRLLDSKCDCDPAGIAGPCDAGRCVCKPAVTGERCDRCRSGYYNLDGGNPEGCTQCFCYGHSASCRSSAEYSVHKITSTFHQDVDGWKAVQRNGSPAKLQWSQRHQDVFSSAQRLDPVYFVAPAKFLGNQQVSYGQSLSFDYRVDRGGRHPSAHDVILEGAGLRITAPLMPLGKTLPCGLTKTYTFRLNEHPSNNWSPQLSYFEYRRLLRNLTALRIRATYGEYSTGYIDNVTLISARPVSGAPAPWVEQCICPVGYKGQFCQDCASGYKRDSARLGPFGTCIPCNCQGGGACDPDTGDCYSGDENPDIECADCPIGFYNDPHDPRSCKPCPCHNGFSCSVMPETEEVVCNNCPPGVTGARCELCADGYFGDPFGEHGPVRPCQPCQCNNNVDPSASGNCDRLTGRCLKCIHNTAGIYCDQCKAGYFGDPLAPNPADKCRACNCNPMGSEPVGCRSDGTCVCKPGFGGPNCEHGAFSCPACYNQVKIQMDQFMQQLQRMEALISKAQGGDGVVPDTELEGRMQQAEQALQDILRDAQISEGASRSLGLQLAKVRSQENSYQSRLDDLKMTVERVRALGSQYQNRVRDTHRLITQMQLSLAESEASLGNTNIPASDHYVGPNGFKSLAQEATRLAESHVESASNMEQLTRETEDYSKQALSLVRKALHEGVGSGSGSPDGAVVQGLVEKLEKTKSLAQQLTREATQAEIEADRSYQHSLRLLDSVSRLQGVSDQSFQVEEAKRIKQKADSLSTLVTRHMDEFKRTQKNLGNWKEEAQQLLQNGKSGREKSDQLLSRANLAKSRAQEALSMGNATFYEVESILKNLREFDLQVDNRKAEAEEAMKRLSYISQKVSDASDKTQQAERALGSAAADAQRAKNGAGEALEISSEIEQEIGSLNLEANVTADGALAMEKGLASLKSEMREVEGELERKELEFDTNMDAVQMVITEAQKVDTRAKNAGVTIQDTLNTLDGLLHLMDQPLSVDEEGLVLLEQKLSRAKTQINSQLRPMMSELEERARQQRGHLHLLETSIDGILADVKNLENIRDNLPPGCYNTQALEQQ

SEQ ID NO: 148 - DNA, 1528 bp, Homo sapiens
ggcacgagggagaagcgaggttctcgttctgagggacaggcttgagatcggctgaagagagcgggcccaggctctgtgaggaggcaagggaggtgagaaccttgctctcagagggtgactcaagtcaacacagggaacccctcttttctacagacacagtgggtcgcaggatctgacaagagtccaggttctcaggggacagggagagcaagaggtcaagagctgtgggacaccacagagcagcactgaaggagaagacctgcctgtgggtccccatcgcccaagtcctgcccacactcccacctgctaccctgatcagagtcatcatgcctcgagctccaaagcgtcagcgctgcatgcctgaagaagatcttcaatcccaaagtgagacacagggcctcgagggtgcacaggctcccctggctgtggaggaggatgcttcatcatccacttccaccagctcctcttttccatcctcttttccctcctcctcctcttcctcctcctcctcctgctatcctctaataccaagcaccccagaggaggtttctgctgatgatgagacaccaaatcctccccagagtgctcagatagcctgctcctccccctcggtcgttgcttcccttccattagatcaatctgatgagggctccagcagccaaaaggaggagagtccaagcaccctacaggtcctgccagacagtgagtctttacccagaagtgagatagatgaaaaggtgactgatttggtgcagtttctgctcttcaagtatcaaatgaaggagccgatcacaaaggcagaaatactggagagtgtcataaaaaattatgaagaccacttccctttgttgtttagtgaagcctccgagtgcatgctgctggtctttggcattgatgtaaaggaagtggatcccactggccactcctttgtccttgtcacctccctgggcctcacctatgatgggatgctgagtgatgtccagagcatgcccaagactggcattctcatacttatcctaagcataatcttcatagagggctactgcacccctgaggaggtcatctgggaagcactgaatatgatggggctgtatgatgggatggagcacctcatttatggggagcccaggaagctgctcacccaagattgggtgcaggaaaactacctggagtaccggcaggtgcctggcagtgatcctgcacggtatgagtttctgtggggtccaagggctcatgctgaaattaggaagatgagtctcctgaaatttttggccaaggtaaatgggagtgatccaagatccttcccactgtggtatgaggaggctttgaaagatgaggaagagagagcccaggacagaattgccaccacagatgatactactgccatggccagtgcaagttctagcgctacaggtagcttctcctaccctgaataaagtaagacagattcttcactgtgttttaaaaggcaagtcaaataccacatgattttactcatatgtggaatctaaaaaaaaaaaaaaaaaaa

SEQ ID NO: 149 - protein, 369 aa, Homo sapiens
MPRAPKRQRCMPEEDLQSQSETQGLEGAQAPLAVEEDASSSTSTSSSFPSSFPSSSSSSSSSCYPLIPSTPEEVSADDETPNPPQSAQIACSSPSVVASLPLDQSDEGSSSQKEESPSTLQVLPDSESLPRSEIDEKVTDLVQFLLFKYQMKEPITKAEILESVIKNYEDHFPLLFSEASECMLLVFGIDVKEVDPTGHSFVLVTSLGLTYDGMLSDVQSMPKTGILILILSIIFIEGYCTPEEVIWEALNMMGLYDGMEHLIYGEPRKLLTQDWVQENYLEYRQVPGSDPARYEFLWGPRAHAEIRKMSLLKFLAKVNGSDPRSFPLWYEEALKDEEERAQDRIATTDDTTAMASASSSATGSFSYPE

SEQ ID NO: 150 - DNA, 735 bp, Homo sapiens
cgacatcagagatgaggacagcattgctgctccttgcagccctggctgtggctacagggccagcccttaccctgcgctgccacgtgtgcaccagctccagcaactgcaagcattctgtggtctgcccggccagctctcgcttctgcaagaccacgaacacagtggagcctctgagggggaatctggtgaagaaggactgtgcggagtcgtgcacacccagctacaccctgcaaggccaggtcagcagcggcaccagctccacccagtgctgccaggaggacctgtgcaatgagaagctgcacaacgctgcacccacccgcaccgccctcgcccacagtgccctcagcctggggctggccctgagcctcctggccgtcatcttagcccccagcctgtgaccttccccccagggaaggcccctcatgcctttccttccctttctctggggattccacacctctcttccccagccggcaacgggggtgccaggagccccaggctgagggcttccccgaaagtctgggaccaggtccaggtgggcatggaatgctgatgacttggagcaggccccacagaccccacagaggatgaagccaccccacagaggatgcagcccccagctgcatggaaggtggaggacagaagccctgtggatccccggatttcacactccttctgttttgttgccgtttattttgtactcaaatctctacatggagataaatgatttaaacc

SEQ ID NO: 151 - protein, 128 aa, Homo sapiens
MRTALLLLAALAVATGPALTLRCHVCTSSSNCKHSVVCPASSRFCKTTNTVEPLRGNLVKKDCAESCTPSYTLQGQVSSGTSSTQCCQEDLCNEKLHNAAPTRTALAHSALSLGLALSLLAVILAPSL

SEQ ID NO: 152 - DNA, 777 bp, Homo sapiens
ggccccttgtctgcagagatggctcccaatgcttcctgcctctgtgtgcatgtccgttccgaggaatgggatttaatgacctttgatgccaacccatatgacagcgtgaaaaaaatcaaagaacatgtccggtctaagaccaaggttcctgtgcaggaccaggttcttttgctgggctccaagatcttaaagccacggagaagcctctcatcttatggcattgacaaagagaagaccatccaccttaccctgaaagtggtgaagcccagtgatgaggagctgcccttgtttcttgtggagtcaggtgatgaggcaaagaggcacctcctccaggtgcgaaggtccagctcagtggcacaagtgaaagcaatgatcgagactaagacgggtataatccctgagacccagattgtgacttgcaatggaaagagactggaagatgggaagatgatggcagattacggcatcagaaagggcaacttactcttcctggcatcttattgtattggagggtgaccaccctggggatggggtgttggcaggggtcaaaaagcttatttcttttaatctcttactcaacgaacacatcttctgatgatttcccaaaattaatgagaatgagatgagtagagtaagatttgggtgggatgggtaggatgaagtatattgcccaactctatgtttctttgattctaacacaattaattaagtgacatgatttttactaatgtattactgagactagtaaataaatttttaaggcaaaatagagcattc

SEQ ID NO: 153 - protein, 165 aa, Homo sapiens
MAPNASCLCVHVRSEEWDLMTFDANPYDSVKKIKEHVRSKTKVPVQDQVLLLGSKILKPRRSLSSYGIDKEKTIHLTLKVVKPSDEELPLFLVESGDEAKRHLLQVRRSSSVAQVKAMIETKTGIIPETQIVTCNGKRLEDGKMMADYGIRKGNLLFLASYCIGG

SEQ ID NO: 154 - DNA, 3466 bp, Homo sapiens
gtgggtcacgtgaaccacttttcgcgcgaaacctggttgttgctgtagtggcggagaggatcgtggtactgctatggcggaatcatcggaatccttcaccatggcatccagcccggcccagcgtcggcgaggcaatgatcctctcacctccagccctggccgaagctcccggcgtactgatgccctcacctccagccctggccgtgaccttccaccatttgaggatgagtccgaggggctcctaggcacagaggggcccctggaggaagaagaggatggagaggagctcattggagatggcatggaaagggactaccgcgccatcccagagctggacgcctatgaggccgagggactggctctggatgatgaggacgtagaggagctgacggccagtcagagggaggcagcagagcgggccatgcggcagcgtgaccgggaggctggccggggcctgggccgcatgcgccgtgggctcctgtatgacagcgatgaggaggacgaggagcgccctgcccgcaagcgccgccaggtggagcgggccacggaggacggcgaggaggacgaggagatgatcgagagcatcgagaacctggaggatctcaaaggccactctgtgcgcgagtgggtgagcatggcgggcccccggctggagatccaccaccgcttcaagaacttcctgcgcactcacgtcgacagccacggccacaacgtcttcaaggagcgcatcagcgacatgtgcaaagagaaccgtgagagcctggtggtgaactatgaggacttggcagccagggagcacgtgctggcctacttcctgcctgaggcaccggcggagctgctgcagatctttgatgaggctgccctggaggtggtactggccatgtaccccaagtacgaccgcatcaccaaccacatccatgtccgcatctcccacctgcctctggtggaggagctgcgctcgctgaggcagctgcatctgaaccagctgatccgcaccagtggggtggtgaccagctgcactggcgtcctgccccagctcagcatggtcaagtacaactgcaacaagtgcaatttcgtcctgggtcctttctgccagtcccagaaccaggaggtgaaaccaggctcctgtcctgagtgccagtcggccggcccctttgaggtcaacatggaggagaccatctatcagaactaccagcgtatccgaatccaggagagtccaggcaaagtggcggctggccggctgccccgctccaaggacgccattctcctcgcagatctggtggacagctgcaagccaggagacgagatagagctgactggcatctatcacaacaactatgatggctccctcaacactgccaatggcttccctgtctttgccactgtcatcctagccaaccacgtggccaagaaggacaacaaggttgctgtaggggaactgaccgatgaagatgtgaagatgatcactagcctctccaaggatcagcagatcggagagaagatctttgccagcattgctccttccatctatggtcatgaagacatcaagagaggcctggctctggccctgttcggaggggagcccaaaaacccaggtggcaagcacaaggtacgtggtgatatcaacgtgctcttgtgcggagaccctggcacagcgaagtcgcagtttctcaagtatattgagaaagtgtccagccgagccatcttcaccactggccagggggcgtcggctgtgggcctcacggcgtatgtccagcggcaccctgtcagcagggagtggaccttggaggctggggccctggttctggctgaccgaggagtgtgtctcattgatgaatttgacaagatgaatgaccaggacagaaccagcatccatgaggccatggagcaacagagcatctccatctcgaaggctggcatcgtcacctccctgcaggctcgctgcacggtcattgctgccgccaaccccataggagggcgctacgacccctcgctgactttctctgagaacgtggacctcacagagcccatcatctcacgctttgacatcctgtgtgtggtgagggacaccgtggacccagtccaggacgagatgctggcccgcttcgtggtgggcagccacgtcagacaccaccccagcaacaaggaggaggaggggctggccaatggcagcgctgctgagcccgccatgcccaacacgtatggcgtggagcccctgccccaggaggtcctgaagaagtacatcatctacgccaaggagagggtccacccgaagctcaaccagatggaccaggacaaggtggccaagatgtacagtgacctgaggaaagaatctatggcgacaggcagcatccccattacggtgcggcacatcgagtccatgatccgcatggcggaggcccacgcgcgcatccatctgcgggactatgtgatcgaagacgacgtcaacatggccatccgcgtgatgctggagagcttcatagacacacagaagttcagcgtcatgcgcagcatgcgcaagacttttgcccgctacctttcattccggcgtgacaacaatgagctgttgctcttcatactgaagcagttagtggcagagcaggtgacatatcagcgcaaccgctttggggcccagcaggacactattgaggtccctgagaaggacttggtggataaggctcgtcagatcaacatccacaacctctctgcattttatgacagtgagctcttcaggatgaacaagttcagccacgacctgaaaaggaaaatgatcctgcagcagttctgaggccctatgccatccataaggattccttgggattctggtttggggtggtcagtgccctctgtgctttatggacacaaaaccagagcacttgatgaactcggggtactagggtcagggcttatagcaggatgtctggctgcacctggcatgactgtttgtttctccaagcctgctttgtgcttctcacctttgggtgggatgccttgccagtgtgtcttacttggttgctgaacatcttgccacctccgagtgctttgtctccactcagtaccttggatcagagctgctgagttcaggatgcctgcgtgtggtttaggtgttagccttcttacatggatgtcaggagagctgctgccctcttggcgtgagttgcgtattcaggctgcttttgctgcctttggccagagagctggttgaagatgtttgtaatcgttttcagtctcctgcaggtttctgtgcccctgtggtggaagagggcacgacagtgccagcgcagcgttctgggctcctcagtcgcaggggtgggatgtgagtcatgcggattatccactcgccacagttatcagctgccattgctccctgtctgtttccccactctcttatttgtgcattcggtttggtttctgtagttttaatttttaataaagttgaataaaatataaaaaaaaaaaaaaaaaa

SEQ ID NO: 155 - protein, 904 aa, Homo sapiens
MAESSESFTMASSPAQRRRGNDPLTSSPGRSSRRTDALTSSPGRDLPPFEDESEGLLGTEGPLEEEEDGEELIGDGMERDYRAIPELDAYEAEGLALDDEDVEELTASQREAAERAMRQRDREAGRGLGRMRRGLLYDSDEEDEERPARKRRQVERATEDGEEDEEMIESIENLEDLKGHSVREWVSMAGPRLEIHHRFKNFLRTHVDSHGHNVFKERISDMCKENRESLVVNYEDLAAREHVLAYFLPEAPAELLQIFDEAALEVVLAMYPKYDRITNHIHVRISHLPLVEELRSLRQLHLNQLIRTSGVVTSCTGVLPQLSMVKYNCNKCNFVLGPFCQSQNQEVKPGSCPECQSAGPFEVNMEETIYQNYQRIRIQESPGKVAAGRLPRSKDAILLADLVDSCKPGDEIELTGIYHNNYDGSLNTANGFPVFATVILANHVAKKDNKVAVGELTDEDVKMITSLSKDQQIGEKIFASIAPSIYGHEDIKRGLALALFGGEPKNPGGKHKVRGDINVLLCGDPGTAKSQFLKYIEKVSSRAIFTTGQGASAVGLTAYVQRHPVSREWTLEAGALVLADRGVCLIDEFDKMNDQDRTSIHEAMEQQSISISKAGIVTSLQARCTVIAAANPIGGRYDPSLTFSENVDLTEPIISRFDILCVVRDTVDPVQDEMLARFVVGSHVRHHPSNKEEEGLANGSAAEPAMPNTYGVEPLPQEVLKKYIIYAKERVHPKLNQMDQDKVAKMYSDLRKESMATGSIPITVRHIESMIRMAEAHARIHLRDYVIEDDVNMAIRVMLESFIDTQKFSVMRSMRKTFARYLSFRRDNNELLLFILKQLVAEQVTYQRNRFGAQQDTIEVPEKDLVDKARQINIHNLSAFYDSELFRMNKFSHDLKRKMILQQF

SEQ ID NO: 156 - DNA, 2119 bp, Homo sapiens
ggcacgagtaggggtggcgggtcagtgctgctcgggggcttctccatccaggtccctggagttcctggtccctggagctccgcacttggcgcgcaacctgcgtgaggcagcgcgactctggcgactggccggccatgccttcccgggctgaggactatgaagtgttgtacaccattggcacaggctcctacggccgctgccagaagatccggaggaagagtgatggcaagatattagtttggaaagaacttgactatggctccatgacagaagctgagaaacagatgcttgtttctgaagtgaatttgcttcgtgaactgaaacatccaaacatcgttcgttactatgatcggattattgaccggaccaatacaacactgtacattgtaatggaatattgtgaaggaggggatctggctagtgtaattacaaagggaaccaaggaaaggcaatacttagatgaagagtttgttcttcgagtgatgactcagttgactctggccctgaaggaatgccacagacgaagtgatggtggtcataccgtattgcatcgggatcttaaaccagccaatgttttcctggatggcaagcaaaacgtcaagcttggagactttgggctagctagaatattaaaccatgacacgagttttgcaaaaacatttgttggcacaccttattacatgtctcctgaacaaatgaatcgcatgtcctacaatgagaaatcagatatctggtcattgggctgcttgctgtatgagttatgtgcattaatgcctccatttacagcttttagccagaaagaactcgctgggaaaatcagagaaggcaaattcaggcgaattccataccgttactctgatgaattgaatgaaattattacgaggatgttaaacttaaaggattaccatcgaccttctgttgaagaaattcttgagaaccctttaatagcagatttggttgcagacgagcaaagaagaaatcttgagagaagagggcgacaattaggagagccagaaaaatcgcaggattccagccctgtattgagtgagctgaaactgaaggaaattcagttacaggagcgagagcgagctctcaaagcaagagaagaaagattggagcagaaagaacaggagctttgtgttcgtgagagactagcagaggacaaactggctagagcagaaaatctgttgaagaactacagcttgctaaaggaacggaagttcctgtctctggcaagtaatccagaacttcttaatcttccatcctcagtaattaagaagaaagttcatttcagtggggaaagtaaagagaacatcatgaggagtgagaattctgagagtcagctcacatctaagtccaagtgcaaggacctgaagaaaaggcttcacgctgcccagctgcgggctcaagccctgtcagatattgagaaaaattaccaactgaaaagcagacagatcctgggcatgcgctagccaggtagagagacacagagctgtgtacaggatgtaatattaccaacctttaaagactgatattcaaatgctgtagtgttgaatacttggccccatgagccatgcctttctgtatagtacacatgatatttcggaattggttttactgttcttcagcaactattgtacaaaatgttcacatttaatttttctttcttcttttaagaacatattataaaaagaatactttcttggttgggcttttaatcctgtgtgtgattactagtaggaacatgagatgtgacattctaaatcttgggagaaaaaataatattaggaaaaaaatatttatgcaggaagagtagcactcactgaatagttttaaatgactgagtggtatgcttacaattgtcatgtctagatttaaattttaagtctgagattttaaatgtttttgagcttagaaaacccagttagatgcaatttggtcattaataccatgacatcttgcttataaatattccattgctctgtagttcaaatctgttagctttgtgaaaattcatcactgtgatgtttgtattctttttttttttctgtttaacagaatatgagctgtctgtcatttacctacttctttcccactaaataaaagaattcttcagtta

SEQ ID NO: 157 - protein, 445 aa, Homo sapiens
MPSRAEDYEVLYTIGTGSYGRCQKIRRKSDGKILVWKELDYGSMTEAEKQMLVSEVNLLRELKHPNIVRYYDRIIDRTNTTLYIVMEYCEGGDLASVITKGTKERQYLDEEFVLRVMTQLTLALKECHRRSDGGHTVLHRDLKPANVFLDGKQNVKLGDFGLARILNHDTSFAKTFVGTPYYMSPEQMNRMSYNEKSDIWSLGCLLYELCALMPPFTAFSQKELAGKIREGKFRRIPYRYSDELNEIITRMLNLKDYHRPSVEEILENPLIADLVADEQRRNLERRGRQLGEPEKSQDSSPVLSELKLKEIQLQERERALKAREERLEQKEQELCVRERLAEDKLARAENLLKNYSLLKERKFLSLASNPELLNLPSSVIKKKVHFSGESKENIMRSENSESQLTSKSKCKDLKKRLHAAQLRAQALSDIEKNYQLKSRQILGMR

SEQ ID NO: 158 - DNA, 910 bp, Homo sapiens
tgagtttgcccccttacccccatcccagtgaatatttgcaattcctaaagacgtgttttgattgtcacacctgggtggggaacatgctactggcatctaatgcatagagggcagtaatgctgctaaacatctttcaacgcacaggacagagccccacaaaagagaattatctagccccaaatgtccataacactgctgttgagaaaacctaccgcaggatcttactgggcttcataggtaagcttgcctttgttctggcttctgtagatatataaaataaagacactgcccagtccctccctcaacgtcccgagccagggctcaaggcaattccaataacagtagaatgaacactaaatattgatttcaaaatctcagcaactagaagaatgaccaaccatcctggttggcctgggactgtcctagttttagcattgaaagtttcaggttccaggaaagccctcaggcctgggctgctggtcaccctagcagctgagggactcttcaatacagaattagtctttgtgcactggagatgaatatactttaatttgtaacatgtgaaaacatctataaacatctactgaagcctgttctgtctgcaccgacattttcattgagtacggattcttcctaccagatacagctgctctacaactttcgagggctggtataaaactagcttttacctatttttaaaaattacatgaatagtaaaaacttggattaacccagtattcgggtattttcaatttccttgggagcttagaggacggacaaataaaaagattatttcaacatcaaatataygctattgtttacatatgaagataaccacatatatgtataaattcaccgttactttttagcaatactataaaatccaacagaaaaaaatagcatttactat

SEQ ID NO: 159 - DNA, 1279 bp, Homo sapiens
ccctgctccagtcacacccggaagctgactggtccacgcacagctgaagcatgaggaaactcatcgcgggactaattttccttaaaatttagacttgcacagtaaggacttcaactgaccttcctcagactgagaactgtttccagtatatacatcaagtcactgagatctccagcaccctgccggtggcactactgagagacgaggtgccagggtggttcctgaaagtgcctgagccccaacttatcagcaaggagctcatcatgctgacagaagtcatggaggtctggcatggcttagtgatcgcggtggtgtccctcttcctgcaggcctgcttcctcaccgccatcaactacctgctcagcaggcacatggcccacaagagtgaacagatactgaaagcggccagtctccaggttcccaggcccagccctggccaccatcatccacctgctgtcaaagagatgaaggagactcagacagagagagacatcccaatgtctgattccctttacaggcatgacagcgacacaccctcagatagcttggatagctcctgcagttcgcctcctgcctgccaggccacagaggatgtggattacacacaagtcgtcttttctgaccctggagaactaaaaaatgactccccgctggactatgagaacataaaggaaatcacagattatgtcaatgtcaatccagaaagacacaagcccagtttctggtattttgtcaaccctgctctgtctgagccagcggaatatgatcaagtggccatgtgaattccaaatatttttaatggggtccagttctctatggattcttacatttaatttgtagggaaatgccatttttcccccttaaacaaggcatggggctcacaagtctatggagacaggccaaaaagaatgtggagaagaaaactgataaatacacagaggtcctcaagacccatggactcctggtctgtacccaaaaaagctgttcgttcctcaaaaacaaaaacaaggcttggctgggaaaacaggccaatgccccggcaagaaaggttgagatcagatgttaggaagaactttcaggtaaagtatgagaactatggagtccatcagcagagatagtagtgaagtctctccccagggaaaattttaaaaaggttgaatcagctgttgtagagttctatttggcaatctcatggttaaatgacttccctttgagctctttaattattggcaataaacaacttctttaaaagttttaaataaaatagcaaccaccacca

SEQ ID NO: 160 - protein, 172 aa, Homo sapiens
MLTEVMEVWHGLVIAVVSLFLQACFLTAINYLLSRHMAHKSEQILKAASLQVPRPSPGHHHPPAVKEMKETQTERDIPMSDSLYRHDSDTPSDSLDSSCSSPPACQATEDVDYTQVVFSDPGELKNDSPLDYENIKEITDYVNVNPERHKPSFWYFVNPALSEPAEYDQVAM

SEQ ID NO: 161 - DNA, 1148 bp, Homo sapiens
cttctttaaatttctttctaggatgttcacttcttctccacaatgaatgagtgtcactatgacaagcacatggactttttttataataggagcaacactgatactgtcgatgactggacaggaacaaagcttgtgattgttttgtgtgttgggacgtttttctgcctgtttatttttttttctaattctctggtcatcgcggcagtgatcaaaaacagaaaatttcatttccccttctactacctgttggctaatttagctgctgccgatttcttcgctggaattgcctatgtattcctgatgtttaacacaggcccagtttcaaaaactttgactgtcaaccgctggtttctccgtcaggggcttctggacagtagcttgactgcttccctcaccaacttgctggttatcgccgtggagaggcacatgtcaatcatgaggatgcgggtccatagcaacctgaccaaaaagagggtgacactgctcattttgcttgtctgggccatcgccatttttatgggggcggtccccacactgggctggaattgcctctgcaacatctctgcctgctcttccctggcccccatttacagcaggagttaccttgttttctggacagtgtccaacctcatggccttcctcatcatggttgtggtgtacctgcggatctacgtgtacgtcaagaggaaaaccaacgtcttgtctccgcatacaagtgggtccatcagccgccggaggacacccatgaagctaatgaagacggtgatgactgtcttaggggcgtttgtggtatgctggaccccgggcctggtggttctgctcctcgacggcctgaactgcaggcagtgtggcgtgcagcatgtgaaaaggtggttcctgctgctggcgctgctcaactccgtcgtgaaccccatcatctactcctacaaggacgaggacatgtatggcaccatgaagaagatgatctgctgcttctctcaggagaacccagagaggcgtccctctcgcatcccctccacagtcctcagcaggagtgacacaggcagccagtacatagaggatagtattagccaaggtgcagtctgcaataaaagcacttcctaaactctggatgcctctcggcccacccaggtgatgactgtcttagg

SEQ ID NO: 162 - protein, 353 aa, Homo sapiens
MNECHYDKHMDFFYNRSNTDTVDDWTGTKLVIVLCVGTFFCLFIFFSNSLVIAAVIKNRKFHFPFYYLLANLAAADFFAGIAYVFLMFNTGPVSKTLTVNRWFLRQGLLDSSLTASLTNLLVIAVERHMSIMRMRVHSNLTKKRVTLLILLVWAIAIFMGAVPTLGWNCLCNISACSSLAPIYSRSYLVFWTVSNLMAFLIMVVVYLRIYVYVKRKTNVLSPHTSGSISRRRTPMKLMKTVMTVLGAFVVCWTPGLVVLLLDGLNCRQCGVQHVKRWFLLLALLNSVVNPIIYSYKDEDMYGTMKKMICCFSQENPERRPSRIPSTVLSRSDTGSQYIEDSISQGAVCNKSTS

SEQ ID NO: 163 - DNA, 4775 bp, Homo sapiens
cagtcgcgcgcggtgcagtcgggaggtggaggcaccggctgcattgttttcgggatcgaggggtgagggcgctatggcacccggctgcaaaactgagttacgcagcgtgacaaatggtcagtctaaccaaccaagtaatgaaggtgatgccatcaaagtttttgtgcgaattcgtcctcctgcagaaagatctgggtcagctgatggagagcagaacttatgcttatctgtgctgtcctccacgagtctccggctgcactccaaccctgagcccaagaccttcacgtttgatcatgttgcagatgtggataccactcaggaatctgtatttgcaactgtggctaaaagcattgtggagtcttgcatgagcggttataatggtaccatctttgcatatggacagactggctcagggaagacatttactatgatgggaccatctgaatctgataatttttctcataacctgagaggagtaatcccacgaagttttgaatatttgttttccttaattgatcgtgaaaaagaaaaggctggagctggaaagagtttcctttgtaagtgttcctttattgaaatctacaacgagcagatatatgatctactggactctgcatcggctggactgtacttaagggagcatatcaagaagggagtctttgttgttggtgcggtggagcaggtggtaacctcagctgctgaagcctatcaggtgctgtctggaggatggaggaatagacgtgtggcatcaacatcaatgaacagagaatcgtctaggtctcatgccgtctttacaattacaatagagtcaatggagaaaagtaatgagattgtgaatatacggacctccctactcaacctggtggatttagcaggatctgaaaggcaaaaagatacccatgcagaagggatgagattgaaggaagcaggtaacataaatcgatcattgagctgcctgggccaagtgattacagcacttgtcgacgtgggtaatggaaaacagagacatgtttgctacagagactccaaacttaccttcttactacgggattcccttggaggtaatgccaaaacagccataattgcaaatgttcatcctggatccaggtgttttggggaaaccctatcaacacttaactttgctcaaagagccaagctgattaaaaacaaggcagtagtaaatgaagacacccaaggaaatgtgagccagctccaagctgaagtgaagaggctcaaagaacaactggcggagcttgcttcaggacagacaccaccagaaagcttcctgaccagagacaaaaagaagactaactatatggagtatttccaggaagcaatgttattctttaagaaatctgaacaggaaaagaagtctctgatagaaaaagttacccaattagaagacctcaccctcaaaaaggaaaaatttattcaatctaataaaatgattgtgaaattccgagaggatcaaataatacgcttggaaaagctccacaaggaatcccggggaggttttctgcctgaggagcaggatcgtttgctctcagaattaaggaatgagattcaaactctgcgagaacaaatagagcaccaccccagagttgcaaagtatgctatggaaaatcattccctcagggaggagaatagaagactgagattattagagcctgtgaaaagagctcaagaaatggatgcccagaccattgcaaaactagaaaaagctttctctgaaataagtggcatggagaaaagtgacaaaaatcagcaaggattttcacctaaagctcagaaagagccatgtttgtttgcaaacactgagaagttaaaagcacaactcctgcaaattcagacagagctgaataattcaaagcaagaatatgaagaattcaaagaacttactaggaaaaggcagctagaattggaatcagagcttcagtctttgcaaaaagcgaaccttaatcttgaaaaccttttggaagcaacaaaagcctgcaagcggcaagaagtttctcagctgaataaaattcatgctgaaacacttaagattataactacaccaaccaaggcctaccaacttcattcccgaccagtaccaaaattaagccctgaaatgggaagctttggctctctatacactcagaattctagcatattagataatgatatattaaatgagccagttcctcctgagatgaatgaacaagcttttgaggccatttctgaagagcttagaacagtgcaggaacaaatgagtgctcttcaagccaaactggatgaagaagagcataaaaacctaaagcttcagcagcatgttgacaaactggaacatcattctacccaaatgcaggagcttttctcatcagaaagaattgattggaccaaacagcaggaagagcttctctcacagttgaatgtccttgaaaagcagcttcaagagactcaaactaaaaatgactttttgaaaagtgaggtacatgacctgcgagtagtccttcattctgctgacaaggagctttcttcagtgaaattggaatatagttcattcaaaacgaatcaggagaaagaattcaacaaactttctgaaagacacatgcatgtacagcttcaattagataatctcaggttagaaaacgaaaagctgcttgagagcaaagcctgcctacaggattcctatgacaacttacaagaaataatgaaatttgagattgaccaactttcaagaaacctccaaaacttcaaaaaagaaaatgaaactctgaaatctgatctgaataatttgatggagcttcttgaggcagaaaaagaacgcaataacaaattatcattacagtttgaagaagataaagaaaacagttctaaagaaatcttaaaagttcttgaggctgtacgtcaggagaaacagaaagagacggccaagtgtgagcagcagatggcaaaagtacagaaactagaagagagcttgcttgctactgaaaaagtgatcagttccctggaaaagtctagagattctgataagaaagttgtagctgacctcatgaaccagatccaggagctaagaacatcggtctgtgagaaaacagaaactatagacaccctgaaacaagaactgaaggacataaattgcaaatacaactctgctttggttgacagagaagagagcagagtgttgatcaagaagcaggaagtggatattctggatctgaaagaaacccttaggctgagaatactttctgaggacatagagagggatatgctctgtgaggacctggctcatgccactgagcagctgaacatgctcacagaggcctcaaaaaaacactcggggctgctgcagtctgcccaggaagaactgaccaagaaggaagccctgattcaggaacttcagcacaagctaaaccaaaagaaagaggaagtagaacagaagaagaatgaatataacttcaaaatgaggcaactagaacatgtgatggattctgctgctgaggatccccagagtcctaagacaccacctcactttcaaacacatttggcaaaactcctggaaacacaagaacaagagatagaagatggaagagcctctaagacttctttggaacaccttgtaacaaagctaaatgaagacagagaagtcaaaaatgctgaaatcctcagaatgaaggagcagttgcgtgaaatggaaaacctacgcctggaaagtcagcagttaatagagaaaaactggctcctgcaaggtcagctggatgatattaaaagacaaaaggaaaacagtgatcagaatcatccagataatcaacagctgaagaatgaacaagaagaaagtatcaaagaaagacttgcaaaaagtaaaatagttgaagaaatgctgaaaatgaaagcagacctagaagaagtccaaagtgccctttacaacaaagagatggaatgccttagaatgactgatgaagtcgaacgaacccaaactttggagtctaaagcattccaggaaaaagaacaactgagatcaaagctggaagaaatgtatgaagaaagagagagaacatcccaggagatggaaatgttaaggaagcaggtggagtgtcttgctgaggaaaatggaaagttggtaggtcaccaaaatttgcatcagaagattcagtacgtagtgcgactaaagaaggaaaatgtcaggcttgctgaggagacagaaaagttgcgtgccgaaaatgtatttttaaaagaaaagaaaagaagtgaatcttgaggattccggtcagctacctaggcatcaccttgtttgaagatgtttcttctcttttacaagtaagacctactcctggccacttaggagagctgaatttatggaccttaattattaaatgtttataaggtggtggtaaccacctcaagtttctgatgaacattctgcatccatatacaccctgtgacagtcagcagtctgctattaagtggcctacttcaaggctttgaatcaacttaagggaaaaccttttgtctttgtaaaaataaaagcctgtagctaaggtttacagtggacattagccagatcattttcttcttagattatgccataatctcctttgattcttatggaagttctaacaatatatggtggttccaacacctgcagtgagtttaatgactgacttagtagcaggtacaagaagcaaacttgttaatatagattatttttgtattcttactttaggtattttacttgagcattttccatgactgtaaataaagccattttttaagataaaaaaaaaaaaaaaaaa

SEQ ID NO: 164 - protein, 1388 aa, Homo sapiens
MAPGCKTELRSVTNGQSNQPSNEGDAIKVFVRIRPPAERSGSADGEQNLCLSVLSSTSLRLHSNPEPKTFTFDHVADVDTTQESVFATVAKSIVESCMSGYNGTIFAYGQTGSGKTFTMMGPSESDNFSHNLRGVIPRSFEYLFSLIDREKEKAGAGKSFLCKCSFIEIYNEQIYDLLDSASAGLYLREHIKKGVFVVGAVEQVVTSAAEAYQVLSGGWRNRRVASTSMNRESSRSHAVFTITIESMEKSNEIVNIRTSLLNLVDLAGSERQKDTHAEGMRLKEAGNINRSLSCLGQVITALVDVGNGKQRHVCYRDSKLTFLLRDSLGGNAKTAIIANVHPGSRCFGETLSTLNFAQRAKLIKNKAVVNEDTQGNVSQLQAEVKRLKEQLAELASGQTPPESFLTRDKKKTNYMEYFQEAMLFFKKSEQEKKSLIEKVTQLEDLTLKKEKFIQSNKMIVKFREDQIIRLEKLHKESRGGFLPEEQDRLLSELRNEIQTLREQIEHHPRVAKYAMENHSLREENRRLRLLEPVKRAQEMDAQTIAKLEKAFSEISGMEKSDKNQQGFSPKAQKEPCLFANTEKLKAQLLQIQTELNNSKQEYEEFKELTRKRQLELESELQSLQKANLNLENLLEATKACKRQEVSQLNKIHAETLKIITTPTKAYQLHSRPVPKLSPEMGSFGSLYTQNSSILDNDILNEPVPPEMNEQAFEAISEELRTVQEQMSALQAKLDEEEHKNLKLQQHVDKLEHHSTQMQELFSSERIDWTKQQEELLSQLNVLEKQLQETQTKNDFLKSEVHDLRVVLHSADKELSSVKLEYSSFKTNQEKEFNKLSERHMHVQLQLDNLRLENEKLLESKACLQDSYDNLQEIMKFEIDQLSRNLQNFKKENETLKSDLNNLMELLEAEKERNNKLSLQFEEDKENSSKEILKVLEAVRQEKQKETAKCEQQMAKVQKLEESLLATEKVISSLEKSRDSDKKVVADLMNQIQELRTSVCEKTETIDTLKQELKDINCKYNSALVDREESRVLIKKQEVDILDLKETLRLRILSEDIERDMLCEDLAHATEQLNMLTEASKKHSGLLQSAQEELTKKEALIQELQHKLNQKKEEVEQKKNEYNFKMRQLEHVMDSAAEDPQSPKTPPHFQTHLAKLLETQEQEIEDGRASKTSLEHLVTKLNEDREVKNAEILRMKEQLREMENLRLESQQLIEKNWLLQGQLDDIKRQKENSDQNHPDNQQLKNEQEESIKERLAKSKIVEEMLKMKADLEEVQSALYNKEMECLRMTDEVERTQTLESKAFQEKEQLRSKLEEMYEERERTSQEMEMLRKQVECLAEENGKLVGHQNLHQKIQYVVRLKKENVRLAEETEKLRAENVFLKEKKRSES

SEQ ID NO: 165 - DNA, 930 bp, Homo sapiens
ttttttttttttttttcacatgctgatgttgctgccgatgatttcaacgcctggctttgagattccgtgagtagtcttgaataatttaaaattcgaaaatcaaattctacttattttctcttaatgctattgtatttcctaattctcagctttaacatgtaagaaagtactttcgctaggggtcttaattgaatggtggggtcgagatgactgcgtcagaattaaatctctggaagacctctgagctccttttaaaatcatcaacaagcgaaaatccttatcaatagcgatgtgggaatgcattaggtacagtattttaaacatacaaaacctaggcatattaaaaagcactcctctggtaatttaataaggaataatgatgtccttaagtttattttaatcagcaagtatgactcaatttgaaaatatgagaacaaatagatttaaataggaacacccagtaaactatggtatgcaaataaactcagaggtaaacttgtgaatacataaatctaaataagtcagttaccatcaaaatattacgtgatcctatatttttctgtccacgtcttaaaagtattttttaccttggggctttattttctttccctcttcccaagattatccaaggcagttccaatacgcgttttcaataatggtaattaaacttttggagggtaatcgccagctgtttccagaaaaatacttttaataggtggtagtcctccctgtaactgggttttcccgggaatccggggggggcatgttgtttttattgtcgccatttttgtttcgtcttttttgttttgttggtggtcaggttttcttttcatagcgggggagaagattttggtcggactagcgccatccagcgggtttagagaaggagcacacttttccccgaatagtggcttttggatgaacaatgaa

SEQ ID NO: 166 - DNA, 1059 bp, Homo sapiens
ccgttccgcgctctggcggctcctcccgggcgatgcctccgctctgggccctgctggccctcggctgcctgcggttcggctcggctgtgaacctgcagccccaactggccagtgtgactttcgccaccaacaaccccacacttaccactgtggccttggaaaagcctctctgcatgtttgacagcaaagaggccctcactggcacccacgaggtctacctgtatgtcctggtcgactcagccatttccaggaatgcctcagtgcaagacagcaccaacaccccactgggctcaacgttcctacaaacagagggtgggaggacaggtccctacaaagctgtggcctttgacctgatcccctgcagtgacctgcccagcctggatgccattggggatgtgtccaaggcctcacagatcctgaatgcctacctggtcagggtgggtgccaacgggacctgcctgtgggatcccaacttccagggcctctgtaacgcacccctgtcggcagccacggagtacaggttcaagtatgtcctggtcaatatgtccacgggcttggtagaggaccagaccctgtggtcggaccccatccgcaccaaccagctcaccccatactcgacgatcgacacgtggccaggccggcggagcggaggcatgatcgtcatcacttccatcctgggctccctgcccttctttctacttgtgggttttgctggcgccattgccctcagcctcgtggacatggggagttctgatggggaaacgactcacgactcccaaatcactcaggaggctgttcccaagtcgctgggggcctcggagtcttcctacacgtccgtgaaccgggggccgccactggacagggctgaggtgtattccagcaagctccaagactgagcccagcaccacccctgggcagcagcatcctcctctctggccttgccccaggccctgcagcggtggttgtcacaccctgacttcagggaaggtgaaacagggcttgtccctccaactgcaggaaaacccttaataaaatcttctgatgagttctaaaaaaaaa

SEQ ID NO: 167 - protein, 287 aa, Homo sapiens
MPPLWALLALGCLRFGSAVNLQPQLASVTFATNNPTLTTVALEKPLCMFDSKEALTGTHEVYLYVLVDSAISRNASVQDSTNTPLGSTFLQTEGGRTGPYKAVAFDLIPCSDLPSLDAIGDVSKASQILNAYLVRVGANGTCLWDPNFQGLCNAPLSAATEYRFKYVLVNMSTGLVEDQTLWSDPIRTNQLTPYSTIDTWPGRRSGGMIVITSILGSLPFFLLVGFAGAIALSLVDMGSSDGETTHDSQITQEAVPKSLGASESSYTSVNRGPPLDRAEVYSSKLQD

SEQ ID NO: 168 - DNA, 990 bp, Homo sapiens
  modified_base (1)..(990): n = g, a, c or t
agggagaggcagtgaccatgaaggctgtgctgcttgccctgttgatggcaggcttggccctgcagccaggcactgccctgctgtgctactcctgcaaagcccaggtgagcaacgaggactgcctgcaggtggagaactgcacccagctgggggagcagtgctggaccgcgcgcatccgcgcagttggcctcctgaccgtcatcagcaaaggctgcagcttgaactgcgtggatgactcacaggactactacgtgggcaagaagaacatcacgtgctgtgacaccgacttgtgcaacgccagcggggcccatgccctgcagccggctgccgccatccttgcgctgctccctgcactcggcctgctgctctggggacccggccagctataggctctggggggccccgctgcagcccacactgggtgtggtgccccaggcctttgtgccactcctcacagaacctggcccagtgggagcctgtcctggttcctgaggcacatcctaacgcaagtttgaccatgtatgtttgcaccccttttccccnaaccctgaccttcccatgggccttttccaggattccnaccnggcagatcagttttagtganacanatccgcntgcagatggcccctccaaccntttntgttgntgtttccatggcccagcattttccacccttaaccctgtgttcaggcacttnttcccccaggaagccttccctgcccaccccatttatgaattgagccaggtttggtccgtggtgtcccccgcacccagcaggggacaggcaatcaggagggcccagtaaaggctgagatgaagtggactgagtagaactggaggacaagagttgacgtgagttcctgggagtttccagagatggggcctggaggcctggaggaaggggccaggcctcacatttgtggggntcccgaatggcagcctgagcacagcgtaggcccttaataaacacctgttggataagccaaaaaa

SEQ ID NO: 169 - protein, 123 aa, Homo sapiens
MKAVLLALLMAGLALQPGTALLCYSCKAQVSNEDCLQVENCTQLGEQCWTARIRAVGLLTVISKGCSLNCVDDSQDYYVGKKNITCCDTDLCNASGAHALQPAAAILALLPALGLLLWGPGQL

SEQ ID NO: 170 - DNA, 796 bp, Homo sapiens
aatcccgacaatggcgaaagacaactcaactgttcgttgcttccagggcctgctgatttttggaaatgtgattattggttgttgcggcattgccctgactgcggagtgcatcttctttgtatctgaccaacacagcctctacccactgcttgaagccaccgacaacgatgacatctatggggctgcctggatcggcatatttgtgggcatctgcctcttctgcctgtctgttctaggcattgtaggcatcatgaagtccagcaggaaaattcttctggcgtatttcattctgatgtttatagtatatgcctttgaagtggcatcttgtatcacagcagcaacacaacgagactttttcacacccaacctcttcctgaagcagatgctagagaggtaccaaaacaacagccctccaaacaatgatgaccagtggaaaaacaatggagtcaccaaaacctgggacaggctcatgctccaggacaattgctgtggcgtaaatggtccatcagactggcaaaaatacacatctgccttccggactgagaataatgatgctgactatccctggcctcgtcaatgctgtgttatgaacaatcttaaagaacctctcaacctggaggcttgtaaactaggcgtgcctggtttttatcacaatcagggctgctatgaactgatctctggtccaatgaaccgacacgcctggggggttgcctggtttggatttgccattctctgctggactttttgggttctcctgggtaccatgttctactggagcagaattgaatattaagaa

SEQ ID NO: 171 - protein, 260 aa, Homo sapiens
MAKDNSTVRCFQGLLIFGNVIIGCCGIALTAECIFFVSDQHSLYPLLEATDNDDIYGAAWIGIFVGICLFCLSVLGIVGIMKSSRKILLAYFILMFIVYAFEVASCITAATQRDFFTPNLFLKQMLERYQNNSPPNNDDQWKNNGVTKTWDRLMLQDNCCGVNGPSDWQKYTSAFRTENNDADYPWPRQCCVMNNLKEPLNLEACKLGVPGFYHNQGCYELISGPMNRHAWGVAWFGFAILCWTFWVLLGTMFYWSRIEY

SEQ ID NO: 172 - DNA, 672 bp, Homo sapiens
atgaggctccaaagaccccgacaggccccggcgggtgggaggcgcgcgccccggggcgggcggggctccccctaccggccagacccggggagaggcgcgcggaggctgcgaaggttccagaagggcggggagggggcgccgcgcgctgaccctccctgggcaccgctggggacgatggcgctgctcgccttgctgctggtcgtggccctaccgcgggtgtggacagacgccaacctgactgcgagacaacgagatccagaggactcccagcgaacggacgagggtgacaatagagtgtggtgtcatgtttgtgagagagaaaacactttcgagtgccagaacccaaggaggtgcaaatggacagagccatactgcgttatagcggccgtgaaaatatttccacgttttttcatggttgcgaagcagtgctccgctggttgtgcagcgatggagagacccaagccagaggagaagcggtttctcctggaagagcccatgcccttcttttacctcaagtgttgtaaaattcgctactgcaatttagaggggccacctatcaactcatcagtgttcaaagaatatgctgggagcatgggtgagagctgtggtgggctgtggctggccatcctcctgctgctggcctccattgcagccggcctcagcctgtcttga

SEQ ID NO: 173 - protein, 223 aa, Homo sapiens
MRLQRPRQAPAGGRRAPRGGRGSPYRPDPGRGARRLRRFQKGGEGAPRADPPWAPLGTMALLALLLVVALPRVWTDANLTARQRDPEDSQRTDEGDNRVWCHVCERENTFECQNPRRCKWTEPYCVIAAVKIFPRFFMVAKQCSAGCAAMERPKPEEKRFLLEEPMPFFYLKCCKIRYCNLEGPPINSSVFKEYAGSMGESCGGLWLAILLLLASIAAGLSLS

SEQ ID NO: 174 - DNA, 1284 bp, Homo sapiens
gggagggagagaggcgcgcgggtgaaaggcgcattgatgcagcctgcggcggcctcggagcgcggcggagccagacgctgaccacgttcctctcctcggtctcctccgcctccagctccgcgctgcccggcagccgggagccatgcgaccccagggccccgccgcctccccgcagcggctccgcggcctcctgctgctcctgctgctgcagctgcccgcgccgtcgagcgcctctgagatccccaaggggaagcaaaaggcgcagctccggcagagggaggtggtggacctgtataatggaatgtgcttacaagggccagcaggagtgcctggtcgagacgggagccctggggccaatggcattccgggtacacctgggatcccaggtcgggatggattcaaaggagaaaagggggaatgtctgagggaaagctttgaggagtcctggacacccaactacaagcagtgttcatggagttcattgaattatggcatagatcttgggaaaattgcggagtgtacatttacaaagatgcgttcaaatagtgctctaagagttttgttcagtggctcacttcggctaaaatgcagaaatgcatgctgtcagcgttggtatttcacattcaatggagctgaatgttcaggacctcttcccattgaagctataatttatttggaccaaggaagccctgaaatgaattcaacaattaatattcatcgcacttcttctgtggaaggactttgtgaaggaattggtgctggattagtggatgttgctatctgggttggcacttgttcagattacccaaaaggagatgcttctactggatggaattcagtttctcgcatcattattgaagaactaccaaaataaatgctttaattttcatttgctacctctttttttattatgccttggaatggttcacttaaatgacattttaaataagtttatgtatacatctgaatgaaaagcaaagctaaatatgtttacagaccaaagtgtgatttcacactgtttttaaatctagcattattcattttgcttcaatcaaaagtggtttcaatattttttttagttggttagaatactttcttcatagtcacattctctcaacctataatttggaatattgttgtggtcttttgttttttctcttagtatagcatttttaaaaaaatataaaagctaccaatctttgtacaatttgtaaatgttaagaattttttttatatctgttaaataaaaattatttccaacaaccttaaaaaaaaaaaaaaaaa

SEQ ID NO: 175 - protein, 243 aa, Homo sapiens
MRPQGPAASPQRLRGLLLLLLLQLPAPSSASEIPKGKQKAQLRQREVVDLYNGMCLQGPAGVPGRDGSPGANGIPGTPGIPGRDGFKGEKGECLRESFEESWTPNYKQCSWSSLNYGIDLGKIAECTFTKMRSNSALRVLFSGSLRLKCRNACCQRWYFTFNGAECSGPLPIEAIIYLDQGSPEMNSTINIHRTSSVEGLCEGIGAGLVDVAIWVGTCSDYPKGDASTGWNSVSRIIIEELPK

SEQ ID NO: 176 - DNA, 2268 bp, Homo sapiens
atggcgaggaagttatctgtaatcttgatcctgacctttgccctctctgtcacaaatccccttcatgaactaaaagcagctgctttcccccagaccactgagaaaattagtccgaattgggaatctggcattaatgttgacttggcaatttccacacggcaatatcatctacaacagcttttctaccgctatggagaaaataattctttgtcagttgaagggttcagaaaattacttcaaaatataggcatagataagattaaaagaatccatatacaccatgaccacgaccatcactcagaccacgagcatcactcagaccatgagcgtcactcagaccatgagcatcactcagaccacgagcatcactctgaccatgatcatcactcccaccataatcatgctgcttctggtaaaaataagcgaaaagctctttgcccagaccatgactcagatagttcaggtaaagatcctagaaacagccaggggaaaggagctcaccgaccagaacatgccagtggtagaaggaatgtcaaggacagtgttagtgctagtgaagtgacctcaactgtgtacaacactgtctctgaaggaactcactttctagagacaatagagactccaagacctggaaaactcttccccaaagatgtaagcagctccactccacccagtgtcacatcaaagagccgggtgagccggctggctggtaggaaaacaaatgaatctgtgagtgagccccgaaaaggctttatgtattccagaaacacaaatgaaaatcctcaggagtgtttcaatgcatcaaagctactgacatctcatggcatgggcatccaggttccgctgaatgcaacagagttcaactatctctgtccagccatcatcaaccaaattgatgctagatcttgtctgattcatacaagtgaaaagaaggctgaaatccctccaaagacctattcattacaaatagcctgggttggtggttttatagccatttccatcatcagtttcctgtctctgctgggggttatcttagtgcctctcatgaatcgggtgtttttcaaatttctcctgagtttccttgtggcactggccgttgggactttgagtggtgatgcttttttacaccttcttccacattctcatgcaagtcaccaccatagtcatagccatgaagaaccagcaatggaaatgaaaagaggaccacttttcagtcatctgtcttctcaaaacatagaagaaagtgcctattttgattccacgtggaagggtctaacagctctaggaggcctgtatttcatgtttcttgttgaacatgtcctcacattgatcaaacaatttaaagataagaagaaaaagaatcagaagaaacctgaaaatgatgatgatgtggagattaagaagcagttgtccaagtatgaatctcaactttcaacaaatgaggagaaagtagatacagatgatcgaactgaaggctatttacgagcagactcacaagagccctcccactttgattctcagcagcctgcagtcttggaagaagaagaggtcatgatagctcatgctcatccacaggaagtctacaatgaatatgtacccagagggtgcaagaataaatgccattcacatttccacgatacactcggccagtcagacgatctcattcaccaccatcatgactaccatcatattctccatcatcaccaccaccaaaaccaccatcctcacagtcacagccagcgctactctcgggaggagctgaaagatgccggcgtcgccactttggcctggatggtgataatgggtgatggcctgcacaatttcagcgatggcctagcaattggtgctgcttttactgaaggcttatcaagtggtttaagtacttctgttgctgtgttctgtcatgagttgcctcatgaattaggtgactttgctgttctactaaaggctggcatgaccgttaagcaggctgtcctttataatgcattgtcagccatgctggcgtatcttggaatggcaacaggaattttcattggtcattatgctgaaaatgtttctatgtggatatttgcacttactgctggcttattcatgtatgttgctctggttgatatggtacctgaaatgctgcacaatgatgctagtgaccatggatgtagccgctgggggtatttctttttacagaatgctgggatgcttttgggttttggaattatgttacttatttccatatttgaacataaaatcgtgtttcgtataaatttctag

SEQ ID NO: 177 - protein, 755 aa, Homo sapiens
MARKLSVILILTFALSVTNPLHELKAAAFPQTTEKISPNWESGINVDLAISTRQYHLQQLFYRYGENNSLSVEGFRKLLQNIGIDKIKRIHIHHDHDHHSDHEHHSDHERHSDHEHHSDHEHHSDHDHHSHHNHAASGKNKRKALCPDHDSDSSGKDPRNSQGKGAHRPEHASGRRNVKDSVSASEVTSTVYNTVSEGTHFLETIETPRPGKLFPKDVSSSTPPSVTSKSRVSRLAGRKTNESVSEPRKGFMYSRNTNENPQECFNASKLLTSHGMGIQVPLNATEFNYLCPAIINQIDARSCLIHTSEKKAEIPPKTYSLQIAWVGGFIAISIISFLSLLGVILVPLMNRVFFKFLLSFLVALAVGTLSGDAFLHLLPHSHASHHHSHSHEEPAMEMKRGPLFSHLSSQNIEESAYFDSTWKGLTALGGLYFMFLVEHVLTLIKQFKDKKKKNQKKPENDDDVEIKKQLSKYESQLSTNEEKVDTDDRTEGYLRADSQEPSHFDSQQPAVLEEEEVMIAHAHPQEVYNEYVPRGCKNKCHSHFHDTLGQSDDLIHHHHDYHHILHHHHHQNHHPHSHSQRYSREELKDAGVATLAWMVIMGDGLHNFSDGLAIGAAFTEGLSSGLSTSVAVFCHELPHELGDFAVLLKAGMTVKQAVLYNALSAMLAYLGMATGIFIGHYAENVSMWIFALTAGLFMYVALVDMVPEMLHNDASDHGCSRWGYFFLQNAGMLLGFGIMLLISIFEHKIVFRINF

SEQ ID NO: 178 - DNA, 2680 bp, Homo sapiens
cacagcgtgggaagcagctctgggggagctcggagctcccgatcacggcttcttgggggtagctacggctgggtgtgtagaacggggccggggctggggctgggtcccctagtggagacccaagtgcgagaggcaagaactctgcagcttcctgccttctgggtcagttccttattcaagtctgcagccggctcccagggagatctcggtggaacttcagaaacgctgggcagtctgcctttcaaccatgcccctgtccctgggagccgagatgtgggggcctgaggcctggctgctgctgctgctactgctggcatcatttacaggccggtgccccgcgggtgagctggagacctcagacgtggtaactgtggtgctgggccaggacgcaaaactgccctgcttctaccgaggggactccggcgagcaagtggggcaagtggcatgggctcgggtggacgcgggcgaaggcgcccaggaactagcgctactgcactccaaatacgggcttcatgtgagcccggcttacgagggccgcgtggagcagccgccgcccccacgcaaccccctggacggctcagtgctcctgcgcaacgcagtgcaggcggatgagggcgagtacgagtgccgggtcagcaccttccccgccggcagcttccaggcgcggctgcggctccgagtgctggtgcctcccctgccctcactgaatcctggtccagcactagaagagggccagggcctgaccctggcagcctcctgcacagctgagggcagcccagcccccagcgtgacctgggacacggaggtcaaaggcacaacgtccagccgttccttcaagcactcccgctctgctgccgtcacctcagagttccacttggtgcctagccgcagcatgaatgggcagccactgacttgtgtggtgtcccatcctggcctgctccaggaccaaaggatcacccacatcctccacgtgtccttccttgctgaggcctctgtgaggggccttgaagaccaaaatctgtggcacattggcagagaaggagctatgctcaagtgcctgagtgaagggcagccccctccctcatacaactggacacggctggatgggcctctgcccagtggggtacgagtggatggggacactttgggctttcccccactgaccactgagcacagcggcatctacgtctgccatgtcagcaatgagttctcctcaagggattctcaggtcactgtggatgttcttgacccccaggaagactctgggaagcaggtggacctagtgtcagcctcggtggtggtggtgggtgtgatcgccgcactcttgttctgccttctggtggtggtggtggtgctcatgtcccgataccatcggcgcaaggcccagcagatgacccagaaatatgaggaggagctgaccctgaccagggagaactccatccggaggctgcattcccatcacacggaccccaggagccagccggaggagagtgtagggctgagagccgagggccaccctgatagtctcaaggacaacagtagctgctctgtgatgagtgaagagcccgagggccgcagttactccacgctgaccacggtgagggagatagaaacacagactgaactgctgtctccaggctctgggcgggccgaggaggaggaagatcaggatgaaggcatcaaacaggccatgaaccattttgttcaggagaatgggaccctacgggccaagcccacgggcaatggcatctacatcaatgggcggggacacctggtctgacccaggcctgcctcccttccctaggcctggctccttctgttgacatgggagattttagctcatcttgggggcctccttaaacacccccatttcttgcggaagatgctccccatcccactgactgcttgacctttacctccaacccttctgttcatcgggagggctccaccaattgagtctctcccaccatgcatgcaggtcactgtgtgtgtgcatgtgtgcctgtgtgagtgttgactgactgtgtgtgtgtggaggggtgactgtccgtggaggggtgactgtgtccgtggtgtgtattatgctgtcatatcagagtcaagtgaactgtggtgtatgtgccacgggatttgagtggttgcgtgggcaacactgtcagggtttggcgtgtgtgtcatgtggctgtgtgtgacctctgcctgaaaaagcaggtattttctcagaccccagagcagtattaatgatgcagaggttggaggagagaggtggagactgtggctcagacccaggtgtgcgggcatagctggagctggaatctgcctccggtgtgagggaacctgtctcctaccacttcggagccatgggggcaagtgtgaagcagccagtccctgggtcagccagaggcttgaactgttacagaagccctctgccctctggtggcctctgggcctgctgcatgtacatattttctgtaaatatacatgcgccgggagcttcttgcaggaatactgctccgaatcacttttaatttttttcttttttttttcttgccctttccattagttgtattttttatttatttttatttttatttttttttagagtttgagtccagcctggacgatatagccagaccctgtctgtaaaaaaaccaaaacccaaaaaaaaaaaaaaaaaaaa

SEQ ID NO: 179 - protein, 510 aa, Homo sapiens
MPLSLGAEMWGPEAWLLLLLLLASFTGRCPAGELETSDVVTVVLGQDAKLPCFYRGDSGEQVGQVAWARVDAGEGAQELALLHSKYGLHVSPAYEGRVEQPPPPRNPLDGSVLLRNAVQADEGEYECRVSTFPAGSFQARLRLRVLVPPLPSLNPGPALEEGQGLTLAASCTAEGSPAPSVTWDTEVKGTTSSRSFKHSRSAAVTSEFHLVPSRSMNGQPLTCVVSHPGLLQDQRITHILHVSFLAEASVRGLEDQNLWHIGREGAMLKCLSEGQPPPSYNWTRLDGPLPSGVRVDGDTLGFPPLTTEHSGIYVCHVSNEFSSRDSQVTVDVLDPQEDSGKQVDLVSASVVVVGVIAALLFCLLVVVVVLMSRYHRRKAQQMTQKYEEELTLTRENSIRRLHSHHTDPRSQPEESVGLRAEGHPDSLKDNSSCSVMSEEPEGRSYSTLTTVREIETQTELLSPGSGRAEEEEDQDEGIKQAMNHFVQENGTLRAKPTGNGIYINGRGHLV

SEQ ID NO: 180 - DNA, 3238 bp, Homo sapiens
aactgagctaacaagaaatactagaaaaggaggaaggagaacattgctgcagcttggatctacaacctaagaaagcaagagtgatcaatctcagctctgttaaacatcttgtttacttactgcattcagcagcttgcaaatggttaactatatgcaaaaaagtcagcatagctgtgaagtatgccgtgaattttaattgagggaaaaagggacaattgcttcaggatgctctagtatgcactctgcttgaaatattttcaatgaaatgctcagtattctatctttgaccagaggttttaactttatgaagctatgggacttgacaaaaagtgatatttgagaagaaagtacgcagtggttggtgttttcttttttttaataaaggaattgaattactttgaacacctcttccagctgtgcattacagataacgtcaggaagagtctctgctttacagaatcggatttcatcacatgacaacatgaagctgtggattcatctcttttattcatctctccttgcctgtatatctttacactcccaaactccagtgctctcatccagaggctcttgtgattctctttgcaattgtgaggaaaaagatggcacaatgctaataaattgtgaagcaaaaggtatcaagatggtatctgaaataagtgtgccaccatcacgacctttccaactaagcttattaaataacggcttgacgatgcttcacacaaatgacttttctgggcttaccaatgctatttcaatacaccttggatttaacaatattgcagatattgagataggtgcatttaatggccttggcctcctgaaacaacttcatatcaatcacaattctttagaaattcttaaagaggatactttccatggactggaaaacctggaattcctgcaagcagataacaattttatcacagtgattgaaccaagtgcctttagcaagctcaacagactcaaagtgttaattttaaatgacaatgctattgagagtcttcctccaaacatcttccgatttgttcctttaacccatctagatcttcgtggaaatcaattacaaacattgccttatgttggttttctcgaacacattggccgaatattggatcttcagttggaggacaacaaatgggcctgcaattgtgacttattgcagttaaaaacttggttggagaacatgcctccacagtctataattggtgatgttgtctgcaacagccctccattttttaaaggaagtatactcagtagactaaagaaggaatctatttgccctactccaccagtgtatgaagaacatgaggatccttcaggatcattacatctggcagcaacatcttcaataaatgatagtcgcatgtcaactaagaccacgtccattctaaaactacccaccaaagcaccaggtttgataccttatattacaaagccatccactcaacttccaggaccttactgccctattccttgtaactgcaaagtcctatccccatcaggacttctaatacattgtcaggagcgcaacattgaaagcttatcagatctgagacctcctccgcaaaatcctagaaagctcattctagcgggaaatattattcacagtttaatgaagtctgatctagtggaatatttcactttggaaatgcttcacttgggaaacaatcgtattgaagttcttgaagaaggatcgtttatgaacctaacgagattacaaaaactctatctaaatggtaaccacctgaccaaattaagtaaaggcatgttccttggtctccataatcttgaatacttatatcttgaatacaatgccattaaggaaatactgccaggaacctttaatccaatgcctaaacttaaagtcctgtatttaaataacaacctcctccaagttttaccaccacatattttttcaggggttcctctaactaaggtaaatcttaaaacaaaccagtttacccatctacctgtaagtaatattttggatgatcttgatttactaacccagattgaccttgaggataacccctgggactgctcctgtgacctggttggactgcagcaatggatacaaaagttaagcaagaacacagtgacagatgacatcctctgcacttcccccgggcatctcgacaaaaaggaattgaaagccctaaatagtgaaattctctgtccaggtttagtaaataacccatccatgccaacacagactagttaccttatggtcaccactcctgcaacaacaacaaatacggctgatactattttacgatctcttacggacgctgtgccactgtctgttctaatattgggacttctgattatgttcatcactattgttttctgtgctgcagggatagtggttcttgttcttcaccgcaggagaagatacaaaaagaaacaagtagatgagcaaatgagagacaacagtcctgtgcatcttcagtacagcatgtatggccataaaaccactcatcacactactgaaagaccctctgcctcactctatgaacagcacatggtgagccccatggttcatgtctatagaagtccatcctttggtccaaagcatctggaagaggaagaagagaggaatgagaaagaaggaagtgatgcaaaacatctccaaagaagtcttttggaacaggaaaatcattcaccactcacagggtcaaatatgaaatacaaaaccacgaaccaatcaacagaatttttatccttccaagatgccagctcattgtacagaaacattttagaaaaagaaagggaacttcagcaactgggaatcacagaatacctaaggaaaaacattgctcagctccagcctgatatggaggcacattatcctggagcccacgaagagctgaagttaatggaaacattaatgtactcacgtccaaggaaggtattagtggaacagacaaaaaatgagtattttgaacttaaagctaatttacatgctgaacctgactatttagaagtcctggagcagcaaacatagatggagagtttgagggctttcgcagaaatgctgtgattctgttttaagtccataccttgtaaataagtgccttacgtgagtgtgtcatcaatcagaacctaagcacagcagtaaactatggggaaaaaaaaagaagaagaaaagaaactcagggatcactgggagaagccatggcattatcttcaggcaatttagtctgtcccaaataaaatcaatccttgcatgtaaatc

SEQ ID NO: 181 - protein, 841 aa, Homo sapiens
MKLWIHLFYSSLLACISLHSQTPVLSSRGSCDSLCNCEEKDGTMLINCEAKGIKMVSEISVPPSRPFQLSLLNNGLTMLHTNDFSGLTNAISIHLGFNNIADIEIGAFNGLGLLKQLHINHNSLEILKEDTFHGLENLEFLQADNNFITVIEPSAFSKLNRLKVLILNDNAIESLPPNIFRFVPLTHLDLRGNQLQTLPYVGFLEHIGRILDLQLEDNKWACNCDLLQLKTWLENMPPQSIIGDVVCNSPPFFKGSILSRLKKESICPTPPVYEEHEDPSGSLHLAATSSINDSRMSTKTTSILKLPTKAPGLIPYITKPSTQLPGPYCPIPCNCKVLSPSGLLIHCQERNIESLSDLRPPPQNPRKLILAGNIIHSLMKSDLVEYFTLEMLHLGNNRIEVLEEGSFMNLTRLQKLYLNGNHLTKLSKGMFLGLHNLEYLYLEYNAIKEILPGTFNPMPKLKVLYLNNNLLQVLPPHIFSGVPLTKVNLKTNQFTHLPVSNILDDLDLLTQIDLEDNPWDCSCDLVGLQQWIQKLSKNTVTDDILCTSPGHLDKKELKALNSEILCPGLVNNPSMPTQTSYLMVTTPATTTNTADTILRSLTDAVPLSVLILGLLIMFITIVFCAAGIVVLVLHRRRRYKKKQVDEQMRDNSPVHLQYSMYGHKTTHHTTERPSASLYEQHMVSPMVHVYRSPSFGPKHLEEEEERNEKEGSDAKHLQRSLLEQENHSPLTGSNMKYKTTNQSTEFLSFQDASSLYRNILEKERELQQLGITEYLRKNIAQLQPDMEAHYPGAHEELKLMETLMYSRPRKVLVEQTKNEYFELKANLHAEPDYLEVLEQQT

SEQ ID NO: 182 - DNA, 1524 bp, Homo sapiens
atggcgggtgcgggcccgaagcggcgcgcgctagcggcgccggcggccgaggagaaggaagaggcgcgggagaagatgctggccgccaagagcgcggacggctcggcgccggcaggcgagggcgagggcgtgaccctgcagcggaacatcacgctgctcaacggcgtggccatcatcgtggggaccattatcggctcgggcatcttcgtgacgcccacgggcgtgctcaaggaggcaggctcgccggggctggcgctggtggtgtgggccgcgtgcggcgtcttctccatcgtgggcgcgctctgctacgcggagctcggcaccaccatctccaaatcgggcggcgactacgcctacatgctggaggtctacggctcgctgcccgccttcctcaagctctggatcgagctgctcatcatccggccttcatcgcagtacatcgtggccctggtcttcgccacctacctgctcaagccgctcttccccacctgcccggtgcccgaggaggcagccaagctcgtggcctgcctctgcgtgctgctgctcacggccgtgaactgctacagcgtgaaggccgccacccgggtccaggatgcctttgccgccgccaagctcctggccctggccctgatcatcctgctgggcttcgtccagatcggaaagggtgatgtgtccaatctagatcccaacttctcatttgaaggcaccaaactggatgtggggaacattgtgctggcattatacagcggcctctttgcctatggaggatggaattacttgaatttcgtcacagaggaaatgatcaacccctacagaaacctgcccctggccatcatcatctccctgcccatcgtgacgctggtgtacgtgctgaccaacctggcctacttcaccaccctgtccaccgagcagatgctgtcgtccgaggccgtggccgtggacttcgggaactatcacctgggcgtcatgtcctggatcatccccgtcttcgtgggcctgtcctgcttcggctccgtcaatgggtccctgttcacatcctccaggctcttcttcgtggggtcccgggaaggccacctgccctccatcctctccatgatccacccacagctcctcacccccgtgccgtccctcgtgttcacgtgtgtgatgacgctgctctacgccttctccaaggacatcttctccgtcatcaacttcttcagcttcttcaactggctctgcgtggccctggccatcatcggcatgatctggctgcgccacagaaagcctgagcttgagcggcccatcaaggtgaacctggccctgcctgtgttcttcatcctggcctgcctcttcctgatcgccgtctccttctggaagacacccgtggagtgtggcatcggcttcaccatcatcctcagcgggctgcccgtctacttcttcggggtctggtggaaaaacaagcccaagtggctcctccagggcatcttctccacgaccgtcctgtgtcagaagctcatgcaggtggtcccccaggagacatag

SEQ ID NO: 183 - protein, 507 aa, Homo sapiens
MAGAGPKRRALAAPAAEEKEEAREKMLAAKSADGSAPAGEGEGVTLQRNITLLNGVAIIVGTIIGSGIFVTPTGVLKEAGSPGLALVVWAACGVFSIVGALCYAELGTTISKSGGDYAYMLEVYGSLPAFLKLWIELLIIRPSSQYIVALVFATYLLKPLFPTCPVPEEAAKLVACLCVLLLTAVNCYSVKAATRVQDAFAAAKLLALALIILLGFVQIGKGDVSNLDPNFSFEGTKLDVGNIVLALYSGLFAYGGWNYLNFVTEEMINPYRNLPLAIIISLPIVTLVYVLTNLAYFTTLSTEQMLSSEAVAVDFGNYHLGVMSWIIPVFVGLSCFGSVNGSLFTSSRLFFVGSREGHLPSILSMIHPQLLTPVPSLVFTCVMTLLYAFSKDIFSVINFFSFFNWLCVALAIIGMIWLRHRKPELERPIKVNLALPVFFILACLFLIAVSFWKTPVECGIGFTIILSGLPVYFFGVWWKNKPKWLLQGIFSTTVLCQKLMQVVPQET

SEQ ID NO: 184 - DNA, 822 bp, Homo sapiens
atgaactggagtatctttgagggactcctgagtggggtcaacaagtactccacagcctttgggcgcatctggctgtctctggtcttcatcttccgcgtgctggtgtacctggtgacggccgagcgtgtgtggagtgatgaccacaaggacttcgactgcaatactcgccagcccggctgctccaacgtctgctttgatgagttcttccctgtgtcccatgtgcgcctctgggccctgcagcttatcctggtgacatgcccctcactgctcgtggtcatgcacgtggcctaccgggaggttcaggagaagaggcaccgagaagcccatggggagaacagtgggcgcctctacctgaaccccggcaagaagcggggtgggctctggtggacatatgtctgcagcctagtgttcaaggcgagcgtggacatcgcctttctctatgtgttccactcattctaccccaaatatatcctccctcctgtggtcaagtgccacgcagatccatgtcccaatatagtggactgcttcatctccaagccctcagagaagaacattttcaccctcttcatggtggccacagctgccatctgcatcctgctcaacctcgtggagctcatctacctggtgagcaagagatgccacgagtgcctggcagcaaggaaagctcaagccatgtgcacaggtcatcacccccacggtaccacctcttcctgcaaacaagacgacctcctttcgggtgacctcatctttctgggctcagacagtcatcctcctctcttaccagaccgcccccgagaccatgtgaagaaaaccatcttgtga

SEQ ID NO: 185 - protein, 273 aa, Homo sapiens
MNWSIFEGLLSGVNKYSTAFGRIWLSLVFIFRVLVYLVTAERVWSDDHKDFDCNTRQPGCSNVCFDEFFPVSHVRLWALQLILVTCPSLLVVMHVAYREVQEKRHREAHGENSGRLYLNPGKKRGGLWWTYVCSLVFKASVDIAFLYVFHSFYPKYILPPVVKCHADPCPNIVDCFISKPSEKNIFTLFMVATAAICILLNLVELIYLVSKRCHECLAARKAQAMCTGHHPHGTTSSCKQDDLLSGDLIFLGSDSHPPLLPDRPRDHVKKTIL

SEQ ID NO: 186 - DNA, 786 bp, Homo sapiens
cgggcgaagcagcgcgggcagcgagatgcagcaccgaggcttcctcctcctcaccctcctcgccctgctggcgctcacctccgcggtcgccaaaaagaaagataaggtgaagaagggcggcccggggagcgagtgcgctgagtgggcctgggggccctgcacccccagcagcaaggattgcggcgtgggtttccgcgagggcacctgcggggcccagacccagcgcatccggtgcagggtgccctgcaactggaagaaggagtttggagccgactgcaagtacaagtttgagaactggggtgcgtgtgatgggggcacaggcaccaaagtccgccaaggcaccctgaagaaggcgcgctacaatgctcagtgccaggagaccatccgcgtcaccaagccctgcacccccaagaccaaagcaaaggccaaagccaagaaagggaagggaaaggactagacgccaagcctggatgccaaggagcccctggtgtcacatggggcctggccacgccctccctctcccaggcccgagatgtgacccaccagtgccttctgtctgctcgttagctttaatcaatcatgccctgccttgtccctctcactccccagccccacccctaagtgcccaaagtggggagggacaagggattctgggaagcttgagcctcccccaaagcaatgtgagtcccagagcccgcttttgttcttccccacaattccattactaagaaacacatcaaataaactgactttttccccccaataaaagctcttcttttttaatat

SEQ ID NO: 187 - protein, 143 aa, Homo sapiens
MQHRGFLLLTLLALLALTSAVAKKKDKVKKGGPGSECAEWAWGPCTPSSKDCGVGFREGTCGAQTQRIRCRVPCNWKKEFGADCKYKFENWGACDGGTGTKVRQGTLKKARYNAQCQETIRVTKPCTPKTKAKAKAKKGKGKD

SEQ ID NO: 188 - DNA, 2398 bp, Homo sapiens
ccgcagaggagcctcggccaggctagccagggcgcccccagcccctccccaggccgcgagcgcccctgccgcggtgcctggcctcccctcccagactgcagggacagcacccggtaactgcgagtggagcggaggacccgagcggctgaggagagaggaggcggcggcttagctgctacggggtccggccggcgccctcccgaggggggctcaggaggaggaaggaggacccgtgcgagaatgcctctgccctggagccttgcgctcccgctgctgctctcctgggtggcaggtggtttcgggaacgcggccagtgcaaggcatcacgggttgttagcatcggcacgtcagcctggggtctgtcactatggaactaaactggcctgctgctacggctggagaagaaacagcaagggagtctgtgaagctacatgcgaacctggatgtaagtttggtgagtgcgtgggaccaaacaaatgcagatgctttccaggatacaccgggaaaacctgcagtcaagatgtgaatgagtgtggaatgaaaccccggccatgccaacacagatgtgtgaatacacacggaagctacaagtgcttttgcctcagtggccacatgctcatgccagatgctacgtgtgtgaactctaggacatgtgccatgataaactgtcagtacagctgtgaagacacagaagaagggccacagtgcctgtgtccatcctcaggactccgcctggccccaaatggaagagactgtctagatattgatgaatgtgcctctggtaaagtcatctgtccctacaatcgaagatgtgtgaacacatttggaagctactactgcaaatgtcacattggtttcgaactgcaatatatcagtggacgatatgactgtatagatataaatgaatgtactatggatagccatacgtgcagccaccatgccaattgcttcaatacccaagggtccttcaagtgtaaatgcaagcagggatataaaggcaatggacttcggtgttctgctatccctgaaaattctgtgaaggaagtcctcagagcacctggtaccatcaaagacagaatcaagaagttgcttgctcacaaaaacagcatgaaaaagaaggcaaaaattaaaaatgttaccccagaacccaccaggactcctacccctaaggtgaacttgcagcccttcaactatgaagagatagtttccagaggcgggaactctcatggaggtaaaaaagggaatgaagagaaaatgaaagaggggcttgaggatgagaaaagagaagagaaagccctgaagaatgacatagaggagcgaagcctgcgaggagatgtgtttttccctaaggtgaatgaagcaggtgaattcggcctgattctggtccaaaggaaagcgctaacttccaaactggaacataaagatttaaatatctcggttgactgcagcttcaatcatgggatctgtgactggaaacaggatagagaagatgattttgactggaatcctgctgatcgagataatgctattggcttctatatggcagttccggccttggcaggtcacaagaaagacattggccgattgaaacttctcctacctgacctgcaaccccaaagcaacttctgtttgctctttgattaccggctggccggagacaaagtcgggaaacttcgagtgtttgtgaaaaacagtaacaatgccctggcatgggagaagaccacgagtgaggatgaaaagtggaagacagggaaaattcagttgtatcaaggaactgatgctaccaaaagcatcatttttgaagcagaacgtggcaagggcaaaaccggcgaaatcgcagtggatggcgtcttgcttgtttcaggcttatgtccagatagccttttatctgtggatgactgaatgttactatctttatatttgactttgtatgtcagttccctggtttttttgatattgcatcataggacctctggcattttagaattactagctgaaaaattgtaatgtaccaacagaaatattattgtaagatgcctttcttgtataagatatgccaatatttgctttaaatatcatatcactgtatcttctcagtcatttctgaatctttccacattatattataaaatatggaaatgtcagtttatctcccctcctcagtatatctgatttgtataagtaagttgatgagcttctctctacaacatttctagaaaatagaaaaaaaagcacagagaaatgtttaactgtttgactcttatgatacttcttggaaactatgacatcaaagatagacttttgcctaagtggcttagctgggtctttcatagccaaacttgtatatttaaattctttgtaataataatatccaaatcatcaaaaaaaaaaaaaaaaa

SEQ ID NO: 189 - protein, 553 aa, Homo sapiens
MPLPWSLALPLLLSWVAGGFGNAASARHHGLLASARQPGVCHYGTKLACCYGWRRNSKGVCEATCEPGCKFGECVGPNKCRCFPGYTGKTCSQDVNECGMKPRPCQHRCVNTHGSYKCFCLSGHMLMPDATCVNSRTCAMINCQYSCEDTEEGPQCLCPSSGLRLAPNGRDCLDIDECASGKVICPYNRRCVNTFGSYYCKCHIGFELQYISGRYDCIDINECTMDSHTCSHHANCFNTQGSFKCKCKQGYKGNGLRCSAIPENSVKEVLRAPGTIKDRIKKLLAHKNSMKKKAKIKNVTPEPTRTPTPKVNLQPFNYEEIVSRGGNSHGGKKGNEEKMKEGLEDEKREEKALKNDIEERSLRGDVFFPKVNEAGEFGLILVQRKALTSKLEHKDLNISVDCSFNHGICDWKQDREDDFDWNPADRDNAIGFYMAVPALAGHKKDIGRLKLLLPDLQPQSNFCLLFDYRLAGDKVGKLRVFVKNSNNALAWEKTTSEDEKWKTGKIQLYQGTDATKSIIFEAERGKGKTGEIAVDGVLLVSGLCPDSLLSVDD

SEQ ID NO: 190 - DNA, 3213 bp, Homo sapiens
agagactcaagatgattccctttttacccatgttttctctactattgctgcttattgttaaccctataaacgccaacaatcattatgacaagatcttggctcatagtcgtatcaggggtcgggaccaaggcccaaatgtctgtgcccttcaacagattttgggcaccaaaaagaaatacttcagcacttgtaagaactggtataaaaagtccatctgtggacagaaaacgactgttttatatgaatgttgccctggttatatgagaatggaaggaatgaaaggctgcccagcagttttgcccattgaccatgtttatggcactctgggcatcgtgggagccaccacaacgcagcgctattctgacgcctcaaaactgagggaggagatcgagggaaagggatccttcacttactttgcaccgagtaatgaggcttgggacaacttggattctgatatccgtagaggtttggagagcaacgtgaatgttgaattactgaatgctttacatagtcacatgattaataagagaatgttgaccaaggacttaaaaaatggcatgattattccttcaatgtataacaatttggggcttttcattaaccattatcctaatggggttgtcactgttaattgtgctcgaatcatccatgggaaccagattgcaacaaatggtgttgtccatgtcattgaccgtgtgcttacacaaattggtacctcaattcaagacttcattgaagcagaagatgacctttcatcttttagagcagctgccatcacatcggacatattggaggcccttggaagagacggtcacttcacactctttgctcccaccaatgaggcttttgagaaacttccacgaggtgtcctagaaaggttcatgggagacaaagtggcttccgaagctcttatgaagtaccacatcttaaatactctccagtgttctgagtctattatgggaggagcagtctttgagacgctggaaggaaatacaattgagataggatgtgacggtgacagtataacagtaaatggaatcaaaatggtgaacaaaaaggatattgtgacaaataatggtgtgatccatttgattgatcaggtcctaattcctgattctgccaaacaagttattgagctggctggaaaacagcaaaccaccttcacggatcttgtggcccaattaggcttggcatctgctctgaggccagatggagaatacactttgctggcacctgtgaataatgcattttctgatgatactctcagcatggttcagcgcctccttaaattaattctgcagaatcacatattgaaagtaaaagttggccttaatgagctttacaacgggcaaatactggaaaccatcggaggcaaacagctcagagtcttcgtatatcgtacagctgtctgcattgaaaattcatgcatggagaaagggagtaagcaagggagaaacggtgcgattcacatattccgcgagatcatcaagccagcagagaaatccctccatgaaaagttaaaacaagataagcgctttagcaccttcctcagcctacttgaagctgcagacttgaaagagctcctgacacaacctggagactggacattatttgtgccaaccaatgatgcttttaagggaatgactagtgaagaaaaagaaattctgatacgggacaaaaatgctcttcaaaacatcattctttatcacctgacaccaggagttttcattggaaaaggatttgaacctggtgttactaacattttaaagaccacacaaggaagcaaaatctttctgaaagaagtaaatgatacacttctggtgaatgaattgaaatcaaaagaatctgacatcatgacaacaaatggtgtaattcatgttgtagataaactcctctatccagcagacacacctgttggaaatgatcaactgctggaaatacttaataaattaatcaaatacatccaaattaagtttgttcgtggtagcaccttcaaagaaatccccgtgactgtctatacaactaaaattataaccaaagttgtggaaccaaaaattaaagtgattgaaggcagtcttcagcctattatcaaaactgaaggacccacactaacaaaagtcaaaattgaaggtgaacctgaattcagactgattaaagaaggtgaaacaataactgaagtgatccatggagagccaattattaaaaaatacaccaaaatcattgatggagtgcctgtggaaataactgaaaaagagacacgagaagaacgaatcattacaggtcctgaaataaaatacactaggatttctactggaggtggagaaacagaagaaactctgaagaaattgttacaagaagaggtcaccaaggtcaccaaattcattgaaggtggtgatggtcatttatttgaagatgaagaaattaaaagactgcttcagggagacacacccgtgaggaagttgcaagccaacaaaaaagttcaaggttctagaagacgattaagggaaggtcgttctcagtgaaaatccaaaaaccagaaaaaaatgtttatacaaccctaagtcaataacctgaccttagaaaattgtgagagccaagttgacttcaggaactgaaacatcagcacaaagaagcaatcatcaaataattctgaacacaaatttaatatttttttttctgaatgagaaacatgagggaaattgtggagttagcctcctgtggtaaaggaattgaagaaaatataacaccttacaccctttttcatcttgacattaaaagttctggctaactttggaatccattagagaaaaatccttgtcaccagattcattacaattcaaatcgaagagttgtgaactgttatcccattgaaaagaccgagccttgtatgtatgttatggatacataaaatgcacgcaagccattatctctccatgggaagctaagttataaaaataggtgcttggtgtacaaaactttttatatcaaaaggctttgcacatttctatatgagtgggtttactggtaaattatgttattttttacaactaattttgtactctcagaatgtttgtcatatgcttcttgcaatgcatattttttaatctcaaacgtttcaataaaaccatttttcagatataaagagaattacttcaaattgagtaattcagaaaaactcaagatttaagttaaaaagtggtttggacttgggaa

SEQ ID NO: 191 - protein, 836 aa, Homo sapiens
MIPFLPMFSLLLLLIVNPINANNHYDKILAHSRIRGRDQGPNVCALQQILGTKKKYFSTCKNWYKKSICGQKTTVLYECCPGYMRMEGMKGCPAVLPIDHVYGTLGIVGATTTQRYSDASKLREEIEGKGSFTYFAPSNEAWDNLDSDIRRGLESNVNVELLNALHSHMINKRMLTKDLKNGMIIPSMYNNLGLFINHYPNGVVTVNCARIIHGNQIATNGVVHVIDRVLTQIGTSIQDFIEAEDDLSSFRAAAITSDILEALGRDGHFTLFAPTNEAFEKLPRGVLERFMGDKVASEALMKYHILNTLQCSESIMGGAVFETLEGNTIEIGCDGDSITVNGIKMVNKKDIVTNNGVIHLIDQVLIPDSAKQVIELAGKQQTTFTDLVAQLGLASALRPDGEYTLLAPVNNAFSDDTLSMVQRLLKLILQNHILKVKVGLNELYNGQILETIGGKQLRVFVYRTAVCIENSCMEKGSKQGRNGAIHIFREIIKPAEKSLHEKLKQDKRFSTFLSLLEAADLKELLTQPGDWTLFVPTNDAFKGMTSEEKEILIRDKNALQNIILYHLTPGVFIGKGFEPGVTNILKTTQGSKIFLKEVNDTLLVNELKSKESDIMTTNGVIHVVDKLLYPADTPVGNDQLLEILNKLIKYIQIKFVRGSTFKEIPVTVYTTKIITKVVEPKIKVIEGSLQPIIKTEGPTLTKVKIEGEPEFRLIKEGETITEVIHGEPIIKKYTKIIDGVPVEITEKETREERIITGPEIKYTRISTGGGETEETLKKLLQEEVTKVTKFIEGGDGHLFEDEEIKRLLQGDTPVRKLQANKKVQGSRRRLREGRSQ

SEQ ID NO: 192 - DNA, 2053 bp, Homo sapiens
ccggctcgcgccctccgggcccagcctcccgagccttcggagcgggcgccgtcccagcccagctccggggaaacgcgagccgcgatgcctggggggtgctcccggggccccgccgccggggacgggcgtctgcggctggcgcgactagcgctggtactcctgggctgggtctcctcgtcttctcccacctcctcggcatcctccttctcctcctcggcgccgttcctggcttccgccgtgtccgcccagcccccgctgccggaccagtgccccgcgctgtgcgagtgctccgaggcagcgcgcacagtcaagtgcgttaaccgcaatctgaccgaggtgcccacggacctgcccgcctacgtgcgcaacctcttccttaccggcaaccagctggccgtgctccctgccggcgccttcgcccgccggccgccgctggcggagctggccgcgctcaacctcagcggcagccgcctggacgaggtgcgcgcgggcgccttcgagcatctgcccagcctgcgccagctcgacctcagccacaacccactggccgacctcagtcccttcgctttctcgggcagcaatgccagcgtctcggcccccagtccccttgtggaactgatcctgaaccacatcgtgccccctgaagatgagcggcagaaccggagcttcgagggcatggtggtggcggccctgctggcgggccgtgcactgcaggggctccgccgcttggagctggccagcaaccacttcctttacctgccgcgggatgtgctggcccaactgcccagcctcaggcacctggacttaagtaataattcgctggtgagcctgacctacgtgtccttccgcaacctgacacatctagaaagcctccacctggaggacaatgccctcaaggtccttcacaatggcaccctggctgagttgcaaggtctaccccacattagggttttcctggacaacaatccctgggtctgcgactgccacatggcagacatggtgacctggctcaaggaaacagaggtagtgcagggcaaagaccggctcacctgtgcatatccggaaaaaatgaggaatcgggtcctcttggaactcaacagtgctgacctggactgtgacccgattcttcccccatccctgcaaacctcttatgtcttcctgggtattgttttagccctgataggcgctattttcctcctggttttgtatttgaaccgcaaggggataaaaaagtggatgcataacatcagagatgcctgcagggatcacatggaagggtatcattacagatatgaaatcaatgcggaccccagattaacaaacctcagttctaactcggatgtctgagaaatattagaggacagaccaaggacaactctgcatgagatgtagacttaagctttatccctactaggcttgctccactttcatcctccactatagatacaacggactttgactaaaagcagtgaaggggatttgcttccttgttatgtaaagtttctcggtgtgttctgttaatgtaagacgatgaacagttgtgtatagtgttttaccctcttctttttcttggaactcctcaacacgtatggagggatttttcaggtttcagcatgaacatgggcttcttgctgtctgtctctctctcagtacagttcaaggtgtagcaagtgtacccacacagatagcattcaacaaaagctgcctcaactttttcgagaaaaatactttattcataaatatcagttttattctcatgtacctaagttgtggagaaaataattgcatcctataaactgcctgcagacgttagcaggctcttcaaaataactccatggtgcacaggagcacctgcatccaagagcatgcttacattttactgttctgcatattacaaaaaataacttgcaacttcataacttctttgacaaagtaaattacttttttgattgcagtttatatgaaaatgtactgatttttttttaataaactgcatcgagatccaaccgactgaattgttaaaaaaaaaaaaaaataaagattcttaaaagaa

SEQ ID NO: 193 - protein, 420 aa, Homo sapiens
MPGGCSRGPAAGDGRLRLARLALVLLGWVSSSSPTSSASSFSSSAPFLASAVSAQPPLPDQCPALCECSEAARTVKCVNRNLTEVPTDLPAYVRNLFLTGNQLAVLPAGAFARRPPLAELAALNLSGSRLDEVRAGAFEHLPSLRQLDLSHNPLADLSPFAFSGSNASVSAPSPLVELILNHIVPPEDERQNRSFEGMVVAALLAGRALQGLRRLELASNHFLYLPRDVLAQLPSLRHLDLSNNSLVSLTYVSFRNLTHLESLHLEDNALKVLHNGTLAELQGLPHIRVFLDNNPWVCDCHMADMVTWLKETEVVQGKDRLTCAYPEKMRNRVLLELNSADLDCDPILPPSLQTSYVFLGIVLALIGAIFLLVLYLNRKGIKKWMHNIRDACRDHMEGYHYRYEINADPRLTNLSSNSDV

SEQ ID NO: 194 - DNA, 1698 bp, Homo sapiens
ggttactcatcctgggctcaggtaagagggcccgagctcggaggcggcacacccaggggggacgccaagggagcaggacggagccatggaccccgccaggaaagcaggtgcccaggccatgatctggactgcaggctggctgctgctgctgctgcttcgcggaggagcgcaggccctggagtgctacagctgcgtgcagaaagcagatgacggatgctccccgaacaagatgaagacagtgaagtgcgcgccgggcgtggacgtctgcaccgaggccgtgggggcggtggagaccatccacggacaattctcgctggcagtgcsgggttgcggttcgggactccccggcaagaatgaccgcggcctggatcttcacgggcttctggcgttcatccagctgcagcaatgcgctcaggatcgctgcaacgccaagctcaacctcacctcgcgggcgctcgacccggcaggtaatgagagtgcatacccgcccaacggcgtggagtgctacagctgtgtgggcctgagccgggaggcgtgccagggtacatcgccgccggtcgtgagctgctacaacgccagcgatcatgtctacaagggctgcttcgacggcaacgtcaccttgacggcagctaatgtgactgtgtccttgcctgtccggggctgtgtccaggatgaattctgcactcgggatggagtaacaggcccagggttcacgctcagtggctcctgttgccaggggtcccgctgtaactctgacctccgcaacaagacctacttctcccctcgaatcccaccccttgtccggctgccccctccagagcccacgactgtggcctcaaccacatctgtcaccacttctacctcggccccagtgagacccacatccaccaccaaacccatgccagcgccaaccagtcagactccgagacagggagtagaacacgaggcctcccgggatgaggagcccaggttgactggaggcgccgctggccaccaggaccgcagcaattcagggcagtatcctgcaaaaggggggccccagcagccccataataaaggctgtgtggctcccacagctggattggcagcccttctgttggccgtggctgctggtgtcctactgtgagcttctccacctggaaatttccctctcacctacttctctggccctgggtacccctcttctcatcacttcctgttcccaccactggactgggctggcccagcccctgtttttccaacattccccagtatccccagcttctgctgcgctggtttgcggctttgggaaataaaataccgttgtatatattctggcaggggtgttctagctttttgaggacagctcctgtatccttctcatccttgtctctccgcttgtcctcttgtgatgttaggacagagtgagagaagtcagctgtcacggggaaggtgagagagaggatgctaagcttcctactcactttctcctagccagcctggactttggagcgtggggtgggtgggacaatggctccccactctaagcactgcctcccctactccccgcatctttggggaatcggttccccatatgtcttccttactagactgtgagctcctcgagggcagggaccgtgccttatgtctgtgtgtgatcagtttctggcacataaatgcctcaataaagatttaattactttgtatagtgaaaaaaaa

SEQ ID NO: 195 - protein, 346 aa, Homo sapiens
  MOD_RES (80): Xaa = Arg or Pro
MDPARKAGAQAMIWTAGWLLLLLLRGGAQALECYSCVQKADDGCSPNKMKTVKCAPGVDVCTEAVGAVETIHGQFSLAVXGCGSGLPGKNDRGLDLHGLLAFIQLQQCAQDRCNAKLNLTSRALDPAGNESAYPPNGVECYSCVGLSREACQGTSPPVVSCYNASDHVYKGCFDGNVTLTAANVTVSLPVRGCVQDEFCTRDGVTGPGFTLSGSCCQGSRCNSDLRNKTYFSPRIPPLVRLPPPEPTTVASTTSVTTSTSAPVRPTSTTKPMPAPTSQTPRQGVEHEASRDEEPRLTGGAAGHQDRSNSGQYPAKGGPQQPHNKGCVAPTAGLAALLLAVAAGVLL

SEQ ID NO: 196 - DNA, 3671 bp, Homo sapiens
  modified_base (1)..(3671): n = g, a, c or t
acctaaaaccttgcaagttcaggaagaaaccatctgcatccatattgaaaacctgacacaatgtatgcagcaggctcagtgtgagtgaactggaggcttctctacaacatgacccaaaggagcattgcaggtcctatttgcaacctgaagtttgtgactctcctggttgccttaagttcagaactcccattcctgggagctggagtacagcttcaagacaatgggtataatggattgctcattgcaattaatcctcaggtacctgagaatcagaacctcatctcaaacattaaggaaatgataactgaagcttcattttacctatttaatgctaccaagagaagagtatttttcagaaatataaagattttaatacctgccacatggaaagctaataataacagcaaaataaaacaagaatcatatgaaaaggcaaatgtcatagtgactgactggtatggggcacatggagatgatccatacaccctacaatacagagggtgtggaaaagagggaaaatacattcatttcacacctaatttcctactgaatgataacttaacagctggctacggatcacgaggccgagtgtttgtccatgaatgggcccacctccgttggggtgtgttcgatgagtataacaatgacaaacctttctacataaatgggcaaaatcaaattaaagtgacaaggtgttcatctgacatcacaggcatttttgtgtgtgaaaaaggtccttgcccccaagaaaactgtattattagtaagctttttaaagaaggatgcacctttatctacaatagcacccaaaatgcaactgcatcaataatgttcatgcaaagtttatcttctgtggttgaattttgtaatgcaagtacccacaaccaagaagcaccaaacctacagaaccagatgtgcagcctcagaagtgcatgggatgtaatcacagactctgctgactttcaccacagctttcccatgaatgggactgagcttccacctcctcccacattctcgcttgtacaggctggtgacaaagtggtctgtttagtgctggatgtgtccagcaagatggcagaggctgacagactccttcaactacaacaagccgcagaattttatttgatgcagattgttgaaattcataccttcgtgggcattgccagtttcgacagcaaaggagagatcagagcccagctacaccaaattaacagcaatgatgatcgaaagttgctggtttcatatctgcccaccactgtatcagctaaaacagacatcagcatttgttcagggcttaagaaaggatttgaggtggttgaaaaactgaatggaaaagcttatggctctgtgatgatattagtgaccagcggagatgataagcttcttggcaattgcttacccactgtgctcagcagtggttcaacaattcactccattgccctgggttcatctgcagccccaaatctggaggaattatcacgtcttacaggaggtttaaagttctttgttccagatatatcaaactccaatagcatgattgatgctttcagtagaatttcctctggaactggagacattttccagcaacatattcagcttgaaagtacaggtgaaaatgtcaaacctcaccatcaattgaaaaacacagtgactgtggataatactgtgggcaacgacactatgtttctagttacgtggcaggccagtggtcctcctgagattatattatttgatcctgatggacgaaaatactacacaaataattttatcaccaatctaacttttcggacagctagtctttggattccaggaacagctaagcctgggcactggacttacaccctgaacaatacccatcattctctgcaagccctgaaagtgacagtgacctctcgcgcctccaactcagctgtgcccccagccactgtggaagcctttgtggaaagagacagcctccattttcctcatcctgtgatgatttatgccaatgtgaaacagggattttatcccattcttaatgccactgtcactgccacagttgagccagagactggagatcctgttacgctgagactccttgatgatggagcaggtgctgatgttataaaaaatgatggaatttactcgaggtattttttctcctttgctgcaaatggtagatatagcttgaaagtgcatgtcaatcactctcccagcataagcaccccagcccactctattccagggagtcatgctatgtatgtaccaggttacacagcaaacggtaatattcagatgaatgctccaaggaaatcagtaggcagaaatgaggaggagcgaaagtggggctttagccgagtcagctcaggaggctccttttcagtgctgggagttccagctggcccccaccctgatgtgtttccaccatgcaaaattattgacctggaagctgtaaaagtagaagaggaattgaccctatcttggacagcacctggagaagactttgatcagggccaggctacaagctatgaaataagaatgagtaaaagtctacagaatatccaagatgactttaacaatgctattttagtaaatacatcaaagcgaaatcctcagcaagctggcatcagggagatatttacgttctcaccccagatttccacgaatggacctgaacatcagccaaatggagaaacacatgaaagccacagaatttatgttgcaatacgagcaatggataggaactccttacagtctgctgtatctaacattgcccaggcgcctctgtttattccccccaattctgatcctgtacctgccagagattatcttatattgaaaggagttttaacagcaatgggtttgataggaatcatttgccttattatagttgtgacacatcatactttaagcaggaaaaagagagcagacaagaaagagaatggaacaaaattattataaataaatatccaaagtgtcttccttcttagatataagacccatggccttcgactacaaaaacatactaacaaagtcaaattaacatcaaaactgtattaaaatgcattgagtttttgtacaatacagataagatttttacatggtagatcaacaattctttttgggggtagattagaaaacccttacactttggctatgaacaaataataaaaattattctttaaagtaatgtctttaaaggcaaagggaagggtaaagtcggaccagtgtcaaggaaagtttgttttattgaggtggaaaaatagccccaagcagagaaaaggagggtaggtctgcattataactgtctgtgtgaagcaatcatttagttactttgattaatttttcttttctccttatctgtgcagtacaggttgcttgtttacatgaagatcatgctatattttatatatgtagcccctaatgcaaagctctttacctcttgctattttgttatatatatttcagatgacatctccctgctaatgctcagagatcttttttcactgtaagaggtaacctttaacaatatgggtattacctttgtctcttcataccggttttatgacaaaggtctattgaatttatttgtntgtaagtttctactcccatcaaagcagctttctaagtttattgccttgggttattatggaatgatagttatagccccntataatgccttacctaggaaa

SEQ ID NO: 197 - protein, 943 aa, Homo sapiens
MTQRSIAGPICNLKFVTLLVALSSELPFLGAGVQLQDNGYNGLLIAINPQVPENQNLISNIKEMITEASFYLFNATKRRVFFRNIKILIPATWKANNNSKIKQESYEKANVIVTDWYGAHGDDPYTLQYRGCGKEGKYIHFTPNFLLNDNLTAGYGSRGRVFVHEWAHLRWGVFDEYNNDKPFYINGQNQIKVTRCSSDITGIFVCEKGPCPQENCIISKLFKEGCTFIYNSTQNATASIMFMQSLSSVVEFCNASTHNQEAPNLQNQMCSLRSAWDVITDSADFHHSFPMNGTELPPPPTFSLVQAGDKVVCLVLDVSSKMAEADRLLQLQQAAEFYLMQIVEIHTFVGIASFDSKGEIRAQLHQINSNDDRKLLVSYLPTTVSAKTDISICSGLKKGFEVVEKLNGKAYGSVMILVTSGDDKLLGNCLPTVLSSGSTIHSIALGSSAAPNLEELSRLTGGLKFFVPDISNSNSMIDAFSRISSGTGDIFQQHIQLESTGENVKPHHQLKNTVTVDNTVGNDTMFLVTWQASGPPEIILFDPDGRKYYTNNFITNLTFRTASLWIPGTAKPGHWTYTLNNTHHSLQALKVTVTSRASNSAVPPATVEAFVERDSLHFPHPVMIYANVKQGFYPILNATVTATVEPETGDPVTLRLLDDGAGADVIKNDGIYSRYFFSFAANGRYSLKVHVNHSPSISTPAHSIPGSHAMYVPGYTANGNIQMNAPRKSVGRNEEERKWGFSRVSSGGSFSVLGVPAGPHPDVFPPCKIIDLEAVKVEEELTLSWTAPGEDFDQGQATSYEIRMSKSLQNIQDDFNNAILVNTSKRNPQQAGIREIFTFSPQISTNGPEHQPNGETHESHRIYVAIRAMDRNSLQSAVSNIAQAPLFIPPNSDPVPARDYLILKGVLTAMGLIGIICLIIVVTHHTLSRKKRADKKENGTKLL

SEQ ID NO: 198 - DNA, 3336 bp, Homo sapiens
ttttcttagacattaactgcagacggctggcaggatagaagcagcggctcacttggactttttcaccagggaaatcagagacaatgatggggctcttccccagaactacaggggctctggccatcttcgtggtggtcatattggttcatggagaattgcgaatagagactaaaggtcaatatgatgaagaagagatgactatgcaacaagctaaaagaaggcaaaaacgtgaatgggtgaaatttgccaaaccctgcagagaaggagaagataactcaaaaagaaacccaattgccaagattacttcagattaccaagcaacccagaaaatcacctaccgaatctctggagtgggaatcgatcagccgccttttggaatctttgttgttgacaaaaacactggagatattaacataacagctatagtcgaccgggaggaaactccaagcttcctgatcacatgtcgggctctaaatgcccaaggactagatgtagagaaaccacttatactaacggttaaaattttggatattaatgataatcctccagtattttcacaacaaattttcatgggtgaaattgaagaaaatagtgcctcaaactcactggtgatgatactaaatgccacagatgcagatgaaccaaaccacttgaattctaaaattgccttcaaaattgtctctcaggaaccagcaggcacacccatgttcctcctaagcagaaacactggggaagtccgtactttgaccaattctcttgaccgagagcaagctagcagctatcgtctggttgtgagtggtgcagacaaagatggagaaggactatcaactcaatgtgaatgtaatattaaagtgaaagatgtcaacgataacttcccaatgtttagagactctcagtattcagcacgtattgaagaaaatattttaagttctgaattacttcgatttcaagtaacagatttggatgaagagtacacagataattggcttgcagtatatttctttacctctgggaatgaaggaaattggtttgaaatacaaactgatcctagaactaatgaaggcatcctgaaagtggtgaaggctctagattatgaacaactacaaagcgtgaaacttagtattgctgtcaaaaacaaagctgaatttcaccaatcagttatctctcgataccgagttcagtcaaccccagtcacaattcaggtaataaatgtaagagaaggaattgcattccgtcctgcttccaagacatttactgtgcaaaaaggcataagtagcaaaaaattggtggattatatcctgggaacatatcaagccatcgatgaggacactaacaaagctgcctcaaatgtcaaatatgtcatgggacgtaacgatggtggatacctaatgattgattcaaaaactgctgaaatcaaatttgtcaaaaatatgaaccgagattctactttcatagttaacaaaacaatcacagctgaggttctggccatagatgaatacacgggtaaaacttctacaggcacggtatatgttagagtacccgatttcaatgacaattgtccaacagctgtcctcgaaaaagatgcagtttgcagttcttcaccttccgtggttgtctccgctagaacactgaataatagatacactggcccctatacatttgcactggaagatcaacctgtaaagttgcctgccgtatggagtatcacaaccctcaatgctacctcggccctcctcagagcccaggaacagatacctcctggagtataccacatctccctggtacttacagacagtcagaacaatcggtgtgagatgccacgcagcttgacactggaagtctgtcagtgtgacaacaggggcatctgtggaacttcttacccaaccacaagccctgggaccaggtatggcaggccgcactcagggaggctggggcctgccgccatcggcctgctgctccttggtctcctgctgctgctgttggccccccttctgctgttgacctgtgactgtggggcaggttctactgggggagtgacaggtggttttatcccagttcctgatggctcagaaggaacaattcatcagtggggaattgaaggagcccatcctgaagacaaggaaatcacaaatatttgtgtgcctcctgtaacagccaatggagccgatttcatggaaagttctgaagtttgtacaaatacgtatgccagaggcacagcggtggaaggcacttcaggaatggaaatgaccactaagcttggagcagccactgaatctggaggtgctgcaggctttgcaacagggacagtgtcaggagctgcttcaggattcggagcagccactggagttggcatctgttcctcagggcagtctggaaccatgagaacaaggcattccactggaggaaccaataaggactacgctgatggggcgataagcatgaattttctggactcctacttttctcagaaagcatttgcctgtgcggaggaagacgatggccaggaagcaaatgactgcttgttgatctatgataatgaaggcgcagatgccactggttctcctgtgggctccgtgggttgttgcagttttattgctgatgacctggatgacagcttcttggactcacttggacccaaatttaaaaaacttgcagagataagccttggtgttgatggtgaaggcaaagaagttcagccaccctctaaagacagcggttatgggattgaatcctgtggccatcccatagaagtccagcagacaggatttgttaagtgccagactttgtcaggaagtcaaggagcttctgctttgtccgcctctgggtctgtccagccagctgtttccatccctgaccctctgcagcatggtaactatttagtaacggagacttactcggcttctggttccctcgtgcaaccttccactgcaggctttgatccacttctcacacaaaatgtgatagtgacagaaagggtgatctgtcccatttccagtgttcctggcaacctagctggcccaacgcagctacgagggtcacatactatgctctgtacagaggatccttgctcccgtctaatatgaccagaatgagctggaataccacactgaccaaatctggatctttggactaaagtattcaaaatagcatagcaaagctcactgtattgggctaataatttggcacttattagcttctctcataaactgatcacgattataaattaaatgtttgggttcataccccaaaagcaatatgttgtcactcctaattctcaagtactattcaaattgtagtaaatcttaaagtttttcaaaaccctaaaatcatattcgc

SEQ ID NO: 199 - protein, 999 aa, Homo sapiens
MMGLFPRTTGALAIFVVVILVHGELRIETKGQYDEEEMTMQQAKRRQKREWVKFAKPCREGEDNSKRNPIAKITSDYQATQKITYRISGVGIDQPPFGIFVVDKNTGDINITAIVDREETPSFLITCRALNAQGLDVEKPLILTVKILDINDNPPVFSQQIFMGEIEENSASNSLVMILNATDADEPNHLNSKIAFKIVSQEPAGTPMFLLSRNTGEVRTLTNSLDREQASSYRLVVSGADKDGEGLSTQCECNIKVKDVNDNFPMFRDSQYSARIEENILSSELLRFQVTDLDEEYTDNWLAVYFFTSGNEGNWFEIQTDPRTNEGILKVVKALDYEQLQSVKLSIAVKNKAEFHQSVISRYRVQSTPVTIQVINVREGIAFRPASKTFTVQKGISSKKLVDYILGTYQAIDEDTNKAASNVKYVMGRNDGGYLMIDSKTAEIKFVKNMNRDSTFIVNKTITAEVLAIDEYTGKTSTGTVYVRVPDFNDNCPTAVLEKDAVCSSSPSVVVSARTLNNRYTGPYTFALEDQPVKLPAVWSITTLNATSALLRAQEQIPPGVYHISLVLTDSQNNRCEMPRSLTLEVCQCDNRGICGTSYPTTSPGTRYGRPHSGRLGPAAIGLLLLGLLLLLLAPLLLLTCDCGAGSTGGVTGGFIPVPDGSEGTIHQWGIEGAHPEDKEITNICVPPVTANGADFMESSEVCTNTYARGTAVEGTSGMEMTTKLGAATESGGAAGFATGTVSGAASGFGAATGVGICSSGQSGTMRTRHSTGGTNKDYADGAISMNFLDSYFSQKAFACAEEDDGQEANDCLLIYDNEGADATGSPVGSVGCCSFIADDLDDSFLDSLGPKFKKLAEISLGVDGEGKEVQPPSKDSGYGIESCGHPIEVQQTGFVKCQTLSGSQGASALSASGSVQPAVSIPDPLQHGNYLVTETYSASGSLVQPSTAGFDPLLTQNVIVTERVICPISSVPGNLAGPTQLRGSHTMLCTEDPCSRLI

SEQ ID NO: 200 - DNA, 626 bp, Homo sapiens
ggacctgggaaggagcataggacagggcaaggcgggataaggaggggcaccacagcccttaaggcacgagggaacctcactgcgcatgctcctttggtgcccacctcagtgcgcatgttcactgggcgtcttcccatcggccccttcgccagtgtggggaacgcggcggagctgtgagccggcgactcgggtccctgaggtctggattctttctccgctactgagacacggcggacacacacaaacacagaaccacacagccagtcccaggagcccagtaatggagagccccaaaaagaagaaccagcagctgaaagtcgggatcctacacctgggcagcagacagaagaagatcaggatacagctgagatcccagtgcgcgacatggaaggtgatctgcaagagctgcatcagtcaaacaccggggataaatctggatttgggttccggcgtcaaggtgaagataatacctaaagaggaacactgtaaaatgccagaagcaggtgaagagcaaccacaagtttaaatgaagacaagctgaaacaacgcaagctggttttatattagatatttgacttaaactatctcaataaagttttgcagctttcaccaaaaaaaaaaaaaaa

SEQ ID NO: 201 - protein, 146 aa, Homo sapiens
MLLWCPPQCACSLGVFPSAPSPVWGTRRSCEPATRVPEVWILSPLLRHGGHTQTQNHTASPRSPVMESPKKKNQQLKVGILHLGSRQKKIRIQLRSQCATWKVICKSCISQTPGINLDLGSGVKVKIIPKEEHCKMPEAGEEQPQV

SEQ ID NO: 202 - DNA, 979 bp, Homo sapiens
  modified_base (1)..(979): n = g, a, c or t
tttagccaccagagganttctcttgaaatacccaaaatccatcagtatcttgaatcatgctggattttgaagaattcttaagaagccatgtaaagggggctctctggccttgaaatagtgatgttttttatacagaaaggagaatgcagaatggtcagactatcatgcactgttaaatttgatttcaagaaattacaggaaaactttccaaagttccatctcacagaannttattttnccaagaattccaagataagtttagttttatggaagacttttatgtggtttttactcactcttcatctcagacatcgacagatgattacatcacttatagttctagtaaatttattaatataaaactcagagacattccaatatccacattgcttacaccattaggcatagattcagtgtcagctatgacaattgaaaatgagctgttttgtgatttaaaggtttaaatttctctaaccaaactgcttgatccagatgcaggactgcaaatgttaatatttgttctggaagaacaatcaaataagacttaagaggaaagggaatggccacaatccacctgaaattttttcttaaaaagtgtgcagcctactaaatcagaatgaaaatagaagtacaagattataaacaaaatgcaatcaaacttttcttaagcttacctaaagttatttcatctgaaaatttcaagcaactttgttcaacattaaattgacaatctaaactaacaagtcttttgaatttatgcatggtagtaaacattctctctattaactttattacctaaggctaaacctaaaatttttaagcaaaattagaaaaatagtcttcactcatcaaaaaataaagtttgttacatttagtattttcccaataaaattggtcgttcttggttttttatttggagagtctgtgcaaaatgtcactaaaaataaattagcactagaaattatttctaaataccaaa

SEQ ID NO: 203 - DNA, 2479 bp, Homo sapiens
gtcatattgaacattccagatacctatcattactcgatgctgttgataacagcaagatggctttgaactcagggtcaccaccagctattggaccttactatgaaaaccatggataccaaccggaaaacccctatcccgcacagcccactgtggtccccactgtctacgaggtgcatccggctcagtactacccgtcccccgtgccccagtacgccccgagggtcctgacgcaggcttccaaccccgtcgtctgcacgcagcccaaatccccatccgggacagtgtgcacctcaaagactaagaaagcactgtgcatcaccttgaccctggggaccttcctcgtgggagctgcgctggccgctggcctactctggaagttcatgggcagcaagtgctccaactctgggatagagtgcgactcctcaggtacctgcatcaacccctctaactggtgtgatggcgtgtcacactgccccggcggggaggacgagaatcggtgtgttcgcctctacggaccaaacttcatccttcagatgtactcatctcagaggaagtcctggcaccctgtgtgccaagacgactggaacgagaactacgggcgggcggcctgcagggacatgggctataagaataatttttactctagccaaggaatagtggatgacagcggatccaccagctttatgaaactgaacacaagtgccggcaatgtcgatatctataaaaaactgtaccacagtgatgcctgttcttcaaaagcagtggtttctttacgctgtttagcctgcggggtcaacttgaactcaagccgccagagcaggatcgtgggcggtgagagcgcgctcccgggggcctggccctggcaggtcagcctgcacgtccagaacgtccacgtgtgcggaggctccatcatcacccccgagtggatcgtgacagccgcccactgcgtggaaaaacctcttaacaatccatggcattggacggcatttgcggggattttgagacaatctttcatgttctatggagccggataccaagtacaaaaagtgatttctcatccaaattatgactccaagaccaagaacaatgacattgcgctgatgaagctgcagaagcctctgactttcaacgacctagtgaaaccagtgtgtctgcccaacccaggcatgatgctgcagccagaacagctctgctggatttccgggtggggggccaccgaggagaaagggaagacctcagaagtgctgaacgctgccaaggtgcttctcattgagacacagagatgcaacagcagatatgtctatgacaacctgatcacaccagccatgatctgtgccggcttcctgcaggggaacgtcgattcttgccagggtgacagtggagggcctctggtcacttcgaacaacaatatctggtggctgataggggatacaagctggggttctggctgtgccaaagcttacagaccaggagtgtacgggaatgtgatggtattcacggactggatttatcgacaaatgaaggcaaacggctaatccacatggtcttcgtccttgacgtcgttttacaagaaaacaatggggctggttttgcttccccgtgcatgatttactcttagagatgattcagaggtcacttcatttttattaaacagtgaacttgtctggctttggcactctctgccatactgtgcaggctgcagtggctcccctgcccagcctgctctccctaaccccttgtccgcaaggggtgatggccggctggttgtgggcactggcggtcaattgtggaaggaagagggttggaggctgcccccattgagatcttcctgctgagtcctttccaggggccaattttggatgagcatggagctgtcacttctcagctgctggatgacttgagatgaaaaaggagagacatggaaagggagacagccaggtggcacctgcagcggctgccctctggggccacttggtagtgtccccagcctacttcacaaggggattttgctgatgggttcttagagccttagcagccctggatggtggccagaaataaagggaccagcccttcatgggtggtgacgtggtagtcacttgtaaggggaacagaaacatttttgttcttatggggtgagaatatagacagtgcccttggtgcgagggaagcaattgaaaaggaacttgccctgagcactcctggtgcaggtctccacctgcacattgggtggggctcctgggagggagactcagccttcctcctcatcctccctgaccctgctcctagcaccctggagagtgaatgccccttggtccctggcagggcgccaagtttggcaccatgtcggcctcttcaggcctgatagtcattggaaattgaggtccatgggggaaatcaaggatgctcagtttaaggtacactgtttccatgttatgtttctacacattgatggtggtgaccctgagttcaaagccatctt

SEQ ID NO: 204 - protein, 492 aa, Homo sapiens
MALNSGSPPAIGPYYENHGYQPENPYPAQPTVVPTVYEVHPAQYYPSPVPQYAPRVLTQASNPVVCTQPKSPSGTVCTSKTKKALCITLTLGTFLVGAALAAGLLWKFMGSKCSNSGIECDSSGTCINPSNWCDGVSHCPGGEDENRCVRLYGPNFILQMYSSQRKSWHPVCQDDWNENYGRAACRDMGYKNNFYSSQGIVDDSGSTSFMKLNTSAGNVDIYKKLYHSDACSSKAVVSLRCLACGVNLNSSRQSRIVGGESALPGAWPWQVSLHVQNVHVCGGSIITPEWIVTAAHCVEKPLNNPWHWTAFAGILRQSFMFYGAGYQVQKVISHPNYDSKTKNNDIALMKLQKPLTFNDLVKPVCLPNPGMMLQPEQLCWISGWGATEEKGKTSEVLNAAKVLLIETQRCNSRYVYDNLITPAMICAGFLQGNVDSCQGDSGGPLVTSNNNIWWLIGDTSWGSGCAKAYRPGVYGNVMVFTDWIYRQMKANG

SEQ ID NO: 205 - DNA, 3766 bp, Homo sapiens
gctctgcccaagccgaggctgcggggccggcgccggcgggaggactgcggtgccccgcggaggggctgagtttgccagggcccacttgaccctgtttcccacctcccgccccccaggtccggaggcgggggcccccggggcgactcgggggcggaccgcggggcggagctgccgcccgtgagtccggccgagccacctgagcccgagccgcgggacaccgtcgctcctgctctccgaatgctgcgcaccgcgatgggcctgaggagctggctcgccgccccatggggcgcgctgccgcctcggccaccgctgctgctgctcctgctgctgctgctcctgctgcagccgccgcctccgacctgggcgctcagcccccggatcagcctgcctctgggctctgaagagcggccattcctcagattcgaagctgaacacatctccaactacacagcccttctgctgagcagggatggcaggaccctgtacgtgggtgctcgagaggccctctttgcactcagtagcaacctcagcttcctgccaggcggggagtaccaggagctgctttggggtgcagacgcagagaagaaacagcagtgcagcttcaagggcaaggacccacagcgcgactgtcaaaactacatcaagatcctcctgccgctcagcggcagtcacctgttcacctgtggcacagcagccttcagccccatgtgtacctacatcaacatggagaacttcaccctggcaagggacgagaaggggaatgtcctcctggaagatggcaagggccgttgtcccttcgacccgaatttcaagtccactgccctggtggttgatggcgagctctacactggaacagtcagcagcttccaagggaatgacccggccatctcgcggagccaaagccttcgccccaccaagaccgagagctccctcaactggctgcaagacccagcttttgtggcctcagcctacattcctgagagcctgggcagcttgcaaggcgatgatgacaagatctactttttcttcagcgagactggccaggaatttgagttctttgagaacaccattgtgtcccgcattgcccgcatctgcaagggcgatgagggtggagagcgggtgctacagcagcgctggacctccttcctcaaggcccagctgctgtgctcacggcccgacgatggcttccccttcaacgtgctgcaggatgtcttcacgctgagccccagcccccaggactggcgtgacacccttttctatggggtcttcacttcccagtggcacaggggaactacagaaggctctgccgtctgtgtcttcacaatgaaggatgtgcagagagtcttcagcggcctctacaaggaggtgaaccgtgagacacagcagtggtacaccgtgacccacccggtgcccacaccccggcctggagcgtgcatcaccaacagtgcccgggaaaggaagatcaactcatccctgcagctcccagaccgcgtgctgaacttcctcaaggaccacttcctgatggacgggcaggtccgaagccgcatgctgctgctgcagccccaggctcgctaccagcgcgtggctgtacaccgcgtccctggcctgcaccacacctacgatgtcctcttcctgggcactggtgacggccggctccacaaggcagtgagcgtgggcccccgggtgcacatcattgaggagctgcagatcttctcatcgggacagcccgtgcagaatctgctcctggacacccacagggggctgctgtatgcggcctcacactcgggcgtagtccaggtgcccatggccaactgcagcctgtacaggagctgtggggactgcctcctcgcccgggacccctactgtgcttggagcggctccagctgcaagcacgtcagcctctaccagcctcagctggccaccaggccgtggatccaggacatcgagggagccagcgccaaggacctttgcagcgcgtcttcggttgtgtccccgtcttttgtaccaacaggggagaagccatgtgagcaagtccagttccagcccaacacagtgaacactttggcctgcccgctcctctccaacctggcgacccgactctggctacgcaacggggcccccgtcaatgcctcggcctcctgccacgtgctacccactggggacctgctgctggtgggcacccaacagctgggggagttccagtgctggtcactagaggagggcttccagcagctggtagccagctactgcccagaggtggtggaggacggggtggcagaccaaacagatgagggtggcagtgtacccgtcattatcagcacatcgcgtgtgagtgcaccagctggtggcaaggccagctggggtgcagacaggtcctactggaaggagttcctggtgatgtgcacgctctttgtgctggccgtgctgctcccagttttattcttgctctaccggcaccggaacagcatgaaagtcttcctgaagcagggggaatgtgccagcgtgcaccccaagacctgccctgtggtgctgccccctgagacccgcccactcaacggcctagggccccctagcaccccgctcgatcaccgagggtaccagtccctgtcagacagccccccggggtcccgagtcttcactgagtcagagaagaggccactcagcatccaagacagcttcgtggaggtatccccagtgtgcccccggccccgggtccgccttggctcggagatccgtgactctgtggtgtgagagctgacttccagaggacgctgccctggcttcaggggctgtgaatgctcggagagggtcaactggacctcccctccgctctgctcttcgtggaacacgaccgtggtgcccggcccttgggagccttggggccagctggcctgctgctctccagtcaagtagcgaagctcctaccacccagacacccaaacagccgtggccccagaggtcctggccaaatatgggggcctgcctaggttggtggaacagtgctccttatgtaaactgagccctttgtttaaaaaacaattccaaatgtgaaactagaatgagagggaagagatagcatggcatgcagcacacacggctgctccagttcatggcctcccaggggtgctggggatgcatccaaagtggttgtctgagacagagttggaaaccctcaccaactggcctcttcaccttccacattatcccgctgccaccggctgccctgtctcactgcagattcaggaccagcttgggctgcgtgcgttctgccttgccagtcagccgaggatgtagttgttgctgccgtcgtcccaccacctcagggaccagagggctaggttggcactgcggccctcaccaggtcctgggctcggacccaactcctggacctttccagcctgtatcaggctgtggccacacgagaggacagcgcgagctcaggagagatttcgtgacaatgtacgcctttccctcagaattcagggaagagactgtcgcctgccttcctccgttgttgcgtgagaacccgtgtgccccttcccaccatatccaccctcgctccatctttgaactcaaacacgaggaactaactgcaccctggtcctctccccagtccccagttcaccctccatccctcaccttcctccactctaagggatatcaacactgcccagcacaggggccctgaatttatgtggtttttatacattttttaataagatgcactttatgtcattttttaataaagtctgaagaattactgttt

SEQ ID NO: 206 - protein, 837 aa, Homo sapiens
MLRTAMGLRSWLAAPWGALPPRPPLLLLLLLLLLLQPPPPTWALSPRISLPLGSEERPFLRFEAEHISNYTALLLSRDGRTLYVGAREALFALSSNLSFLPGGEYQELLWGADAEKKQQCSFKGKDPQRDCQNYIKILLPLSGSHLFTCGTAAFSPMCTYINMENFTLARDEKGNVLLEDGKGRCPFDPNFKSTALVVDGELYTGTVSSFQGNDPAISRSQSLRPTKTESSLNWLQDPAFVASAYIPESLGSLQGDDDKIYFFFSETGQEFEFFENTIVSRIARICKGDEGGERVLQQRWTSFLKAQLLCSRPDDGFPFNVLQDVFTLSPSPQDWRDTLFYGVFTSQWHRGTTEGSAVCVFTMKDVQRVFSGLYKEVNRETQQWYTVTHPVPTPRPGACITNSARERKINSSLQLPDRVLNFLKDHFLMDGQVRSRMLLLQPQARYQRVAVHRVPGLHHTYDVLFLGTGDGRLHKAVSVGPRVHIIEELQIFSSGQPVQNLLLDTHRGLLYAASHSGVVQVPMANCSLYRSCGDCLLARDPYCAWSGSSCKHVSLYQPQLATRPWIQDIEGASAKDLCSASSVVSPSFVPTGEKPCEQVQFQPNTVNTLACPLLSNLATRLWLRNGAPVNASASCHVLPTGDLLLVGTQQLGEFQCWSLEEGFQQLVASYCPEVVEDGVADQTDEGGSVPVIISTSRVSAPAGGKASWGADRSYWKEFLVMCTLFVLAVLLPVLFLLYRHRNSMKVFLKQGECASVHPKTCPVVLPPETRPLNGLGPPSTPLDHRGYQSLSDSPPGSRVFTESEKRPLSIQDSFVEVSPVCPRPRVRLGSEIRDSVV

SEQ ID NO: 207 - protein, 6 aa, Artificial Sequence
  Description of Artificial Sequence:HIS6 epitope tag
HHHHHH
